(19) United States
(12) Patent Application Publication
(10) Pub. No.: US 2008/0189799 A1
(43) Pub. Date: Aug. 7, 2008

(54) Genetically engineered and phenotyped mice and stem cell clones for producing the same

(76) Inventors: Liangfen Fan, Spring, TX (US); Glenn Friedrich, Houston, TX (US); Laurie Jeanette Minze, Katy, TX (US); Charles Montgomery, Jay, OK (US); Bobby Joe Payne, The Woodlands, TX (US); Carolina Rangel, Houston, TX (US); Arthur T. Sands, The Woodlands, TX (US); Tracy Ellen Willis Sevaux, Conroe, TX (US); Zheng-Zheng Shi, The Woodlands, TX (US); Mary Jean Sparks, Magnolia, TX (US); Peter Vogel, The Woodlands, TX (US); Brian Zambrowicz, The Woodlands, TX (US)

Correspondence Address: STAHL LAW FIRM, 2 MEADOWSWEET LANE, SAN CARLOS, CA, 94070, US

(21) Appl. No.: 11/978,234

(22) Filed: Oct. 26, 2007

Related U.S. Application Data
(63) Continuation-in-part of application No. 11/488,469, filed on Jul. 18, 2006.
Application No. 11/488,469 is a continuation-in-part of application No. 11/124,617, filed on May 6, 2005, now abandoned.
Application No. 11/124,617 is a continuation of application No. 09/773,476, filed on Jan. 31, 2001, now abandoned.
Application No. 09/773,476 is a continuation-in-part of application No. 11/488,469, filed on Jul. 18, 2006.
Application No. 11/488,469 is a continuation-in-part of application No. 10/964,549, filed on Oct. 13, 2004, now abandoned.
Application No. 10/964,549 is a continuation of application No. 09/750,456, filed on Dec. 28, 2000, now abandoned.
Application No. 09/750,456 is a continuation-in-part of application No. 09/728,445, filed on Nov. 30, 2000, now abandoned.
Application No. 09/728,445 is a continuation-in-part of application No. 11/488,469, filed on Jul. 18, 2006.
Application No. 11/488,469 is a continuation-in-part of application No. 10/770,021, filed on Feb. 2, 2004, now abandoned.
Application No. 10/770,021 is a continuation of application No. 09/680,959, filed on Oct. 4, 2000, now abandoned.
Application No. 09/680,959 is a continuation-in-part of application No. 11/488,469, filed on Jul. 18, 2006.
Application No. 11/488,469 is a continuation-in-part of application No. 10/846,839, filed on May 14, 2004, now abandoned.
Application No. 10/846,839 is a continuation of application No. 09/620,607, filed on Jul. 20, 2000, now abandoned.
(60) Provisional application No. 60/179,110, filed on Jan. 31, 2000.
(60) Provisional application No. 60/168,358, filed on Dec. 1, 1999.
(60) Provisional application No. 60/157,651, filed on Oct. 4, 1999.
(60) Provisional application No. 60/144,942, filed on Jul. 20, 1999.

(51) Int. Cl. C12N 15/11; A01K 67/027

(52) U.S. Cl. 800/6; 800/18

(57) ABSTRACT

The current invention relates to genetically engineered mice, cells derived from those mice, and polynucleotides and polypeptides corresponding to genes affected by the engineered mutation. The invention also relates to antibodies raised in a mouse of the invention. The invention further provides methods for using the mice, cells, polynucleotides, polypeptides and antibodies of the invention.

[0001] This application is a continuation-in-part of U.S. application Ser. No. 11/488,469 filed Jul. 18, 2006, currently pending, which is a continuation-in-part of U.S. application Ser. No. 11/124,617 filed May 6, 2005, now abandoned, which is a continuation of U.S. application Ser. No. 09/773,476 filed Jan. 31, 2001, now abandoned, which claims benefit of U.S. Provisional Application No. 60/179,110 filed Jan. 31, 2000, now abandoned; this application is a continuation-in-part of U.S. application Ser. No. 11/488,469 filed Jul. 18, 2006, currently pending, which is a continuation-in-part of U.S. application Ser. No. 10/964,549 filed Oct. 13, 2004, currently pending, which is a continuation of U.S. application Ser. No. 09/750,456 filed Dec. 28, 2000, now abandoned, which is a continuation-in-part of U.S. application Ser. No. 09/728,445 filed Nov. 30, 2000, now abandoned, which claims benefit of U.S. Provisional Application No. 60/168,358 filed Dec. 1, 1999, now abandoned; this application is a continuation-in-part of U.S. application Ser. No. 11/488,469 filed Jul. 18, 2006, currently pending, which is a continuation-in-part of U.S. application Ser. No. 10/770,021 filed Feb. 2, 2004, now abandoned, which is a continuation of U.S. application Ser. No. 09/680,959 filed Oct. 4, 2000, now abandoned, which claims benefit of U.S. Provisional Application No. 60/157,651 filed Oct. 4, 1999, now abandoned; this application is a continuation-in-part of U.S. application Ser. No. 11/488,469 filed Jul. 18, 2006, currently pending, which is a continuation-in-part of U.S. application Ser. No. 10/846,839 filed May 14, 2004, now abandoned, which is a continuation of U.S. application Ser. No. 09/620,607 filed Jul. 20, 2000, now abandoned, which claims benefit of U.S. Provisional Application No. 60/144,942 filed Jul. 20, 1999, now abandoned; all of which are incorporated herein by reference.

### 1.0 SUBMISSION ON COMPACT DISC

[0002] The contents of the following submission on compact discs are incorporated herein by reference in their entirety: a compact disc copy of the Sequence Listing (COPY 1) (file name: Lexicon 3679 Listing.txt; date recorded: Oct. 25, 2007; size: 1,834 kilobytes); a duplicate compact disc copy of the Sequence Listing (COPY 2) (file name: Lexicon 3679 Listing.txt; date recorded: Oct. 25, 2007; size: 1,834 kilobytes); and a computer readable form copy of the Sequence Listing (CRF COPY) (file name: Lexicon 3679 Listing.txt; date recorded: Oct. 25, 2007; size: 1,834 kilobytes).

### 2.0 FIELD OF THE INVENTION

[0003] The present invention relates to genotypic and phenotypic analyses of multiple genes in mice for the rapid and efficient development of drugs and therapies. The invention also relates to the individual mutant animal lines and their respective phenotypes, ES cells to generate animals and other cell lines, and antibodies generated in the animals. The massive phenotypic analysis provided by the present invention represents a key breakthrough in making drug development for therapy more efficient and thus faster and more affordable.

### 3.0 BACKGROUND

[0004] The development of new drugs and therapies has traditionally benefited from modeling the disease of interest, typically in a suitable animal species. Species of particular interest share a close evolutional relationship to humans, are physiologically relevant to human disease, are capable of supporting research through short generational cycles, and are scientifically well defined to generate consistent and meaningful data of disease phenotype and physiology of drug effects. For over a century, mice have been recognized as highly suited for drug development.

[0005] Where animal models for disease are sought, they can be obtained by observing phenotypes in animals to find a naturally occurring variant that mimics the pathology of a disease of interest as closely as possible. Ideally, such a variant would be the result of a naturally occurring mutation so that the animal could be propagated for research. Yet, the likelihood of finding such animal models is small and only a limited number of desirable animal models for diseases of interest have been identified this way.

[0006] New ways of generating mouse variants resulted from technologies for engineering mutations into the genome of mice. These technologies facilitate the introduction of changes into the mouse genome, either through random or targeted events. Of particular value is site specific mutagenesis of the mouse genome, especially when combined with the genetic and phenotypic characterization of the resulting mouse variant. Site specific mouse mutants have provided valuable insights that have been key in improved allocation of drug development efforts and thus saved valuable time and ultimately lives.

[0007] Expanding the number of mouse variants with engineered depletion of genomic function would provide additional opportunities for more efficient drug development for therapy. Particularly desirable would be a bank of mouse mutants, each representing a depletion of a particular genomic function, each being characterized as to the specific site of the mutation and the gene affected, and each mutant being characterized on the homozygote, heterozygote, and wild-type level for a number of different physiological parameters for quick identification of most desirable phenotypes for multiple types of diseases. Such a bank of mouse mutants would be especially useful if it included functional depletions for most genes in the mouse genome as that would substantially increase the probability of obtaining a mouse mutant with a phenotype specific for many diseases of interest.

[0008] The present invention provides such a bank of mouse mutants in certain embodiments. More specifically, the present invention provides a bank of multiple mutant mouse lines, representing functional depletions of many genes of the mouse genome, all genetically and phenotypically characterized.

### 4.0 SUMMARY OF THE INVENTION

[0009] The present invention provides in certain embodiments a library or bank of mice (mouse library), each mouse comprising a mutation engineered into its genome, and in certain preferred embodiments, each mouse of the library comprises an engineered mutation that is distinct from the mutation engineered into the other mice of the library (distinct engineered mutation). In certain preferred embodiments, a mouse library according to the invention comprises at least 50 mice with each carrying a distinct engineered mutation, and more preferably at least 100 mice, 1,000 mice, 10,000 mice, or 50,000 mice, each library comprising mice carrying a distinct engineered mutation. The current invention also comprises individual mice and mouse lines carrying an engineered mutation.

[0010] In certain preferred embodiments, a mouse library of the current invention comprises mice that can be bred to be heterozygous and/or homozygous for the engineered mutation. In certain other preferred embodiments, a mouse library of the current invention comprises mice that have been characterized as to the engineered mutation, changes in gene expression, and the phenotype of the mice, preferably heterozygous and homozygous for the engineered mutation. In certain embodiments, the current invention provides animal models for drug development. For example, a mouse of the current invention, in certain embodiments, lacks a genomic function and said function is linked to phenotypic traits affiliated with one or more diseases.

[0011] The invention further comprises cells, for example, an embryonic stem cell (ES cell), a fibroblast, a nerve cell, a muscle cell, any cell derived from an ES cell of the invention. In certain embodiments, a cell of the invention carries an engineered mutation.

[0012] In certain other embodiments, the current invention provides antibodies, and in certain preferred embodiments, antibodies generated using a mouse of the invention.

### 5.0 BRIEF DESCRIPTION OF THE DRAWINGS

[0013] FIGS. 1-20: Each figure presents one of gene trap vectors VICTR21, VICTR22, VICTR23, VICTR24, VICTR25, VICTR27, VICTR30, VICTR31, VICTR32, VICTR37, VICTR40, VICTR41, VICTR44, VICTR48, VICTR48 MTII, VICTR49, VICTR54, VICTR62, VICTR628, and VICTR743. The total length of each vector is provided in nucleotides. Abbreviations followed by an arabic number represent restriction enzymes and the number constitutes the number of the nucleotide in the vector at which the enzymes are capable of cutting the vector. Enzymes with an asterix at the number can cut the vector only at a single site. Non-cutters are enzymes that cannot cut the vector at any site. Sequence elements of the vector are abbreviated as follows. Where a sequence element is written upside down, it means the orientation of the element is reversed. LTR is a modified (deleted enhancer) long terminal repeat from Moloney murine leukemia virus; SA is a splice acceptor; SA-TM is a splice acceptor-transmembrane domain for trapping secreted proteins more effectively (allowing the fusion protein resulting from genomic and vector sequences to be retained intracellularly); frt is FRT recombinase; IRES is an internal ribosome entry site from EMCV (encephalomyocarditis virus); BGEO (or OGEO) is a fusion of betagalactosidase and neomycin (neo) resistance gene; pA is a SV40 gene polyadenylation signal sequence; PGK is a phosphoglycerate kinase promoter from mouse phosphoglycerate kinase-1 gene; BTK is a mouse Bruton agammaglobulinemia tyrosine kinase gene, first non-coding exon; PURO is a puromycin resistance gene coding sequence that lacks a polyadenylation sequence; SD is a splice donor sequence from mouse BTK first exon; NEO is a neomycin resistance gene; Gastrin is the first exon of the gastrin gene; SV40tpA is a concatenated triple polyadenylation signal from the major viral coat protein 1 gene of the SV40 virus; BGlobinTerm is a transcriptional terminator that operates in opposite direction of viral transcription; CRE is cre recombinase; MTII pA is a 530 base pair segment that includes the last two exons, with intervening intron, of the mouse metallothionein 2 gene and its polyadenylation signal; SCR is self-cleaving RNA.

### 6.0 DETAILED DESCRIPTION OF THE INVENTION

[0014] The present invention describes libraries of mice carrying engineered mutations affecting multiple genes and facilitating efficient drug development for therapy. The present invention provides mouse libraries, individual lines of mice comprising the described mouse libraries, ES cells to generate mice and other cell types specific for the mice of the libraries. The invention also comprises other compositions and methods related to the mouse libraries and ES cells described herein.

### 6.1 Mouse Libraries of the Current Invention

[0015] A mouse library of the invention preferably comprises a collection of mice and, more preferably, mice of said collection have an engineered genomic mutation. A collection of mice comprising a mouse library of the invention, in certain embodiments, comprises at least 50 mice, or at least 100 mice, at least 200 mice, at least 300 mice, at least 400 mice, at least 500 mice, at least 750 mice, at least 1000 mice, at least 2500 mice, at least 5000 mice, at least 7500 mice, at least 10000 mice, at least 25000 mice, at least 50000 mice, or at least 100000 mice. The mice in a collection of mice of the invention, in certain preferred embodiments, comprise an engineered genomic mutation. A collection of mice of the present invention, in certain embodiments, comprises at least 50 different engineered genomic mutations, or at least 100, at least 200, at least 300, at least 400, at least 500, at least 750, at least 1000, at least 2500, at least 5000, at least 7500, at least 10000, at least 25000, at least 50000, or at least 100000 engineered genomic mutations.

[0016] A mouse of a mouse library of the invention, in certain embodiments, may be of any strain, or of a mixture of strains, or a chimera, or a derivative of one or more strains. Examples of mouse strains are 129, Black 6, C57BL/6, CD-1. See, for example, U.S. Pat. Nos. 6,878,542; 6,815,185 for mouse strains, all of which are incorporated herein by reference for all purposes. A listing of various mouse strains is provided in “Genetic Variants and Strains of the Laboratory Mouse” 3rd Ed., Vols. 1 and 2, 1996, Lyon et al., eds., Oxford University Press, NY, N.Y., herein incorporated by reference in its entirety. The mouse may be a female or male mouse, a young mouse, an adult mouse, a mouse with a known phenotype or an unknown phenotype, a mouse with a known genotype or an unknown genotype.

[0017] An engineered mutation in a mouse of a library of the current invention affects the genome in the nucleus of the cells of the mice. An engineered mutation, in certain embodiments, comprises any one, two, three, four, five or more of an insertion, a deletion, a replacement, an inversion, a truncation, a point mutation, a translocation, a duplication, an amplification, a recombination, and/or any other kind of alteration of the genome. A mutation may, in certain embodiments, affect, change, disturb or alter the structure of the genome of a mouse, or the function of the genome, or both. A mutation may affect, change, disturb or alter the genome of a mouse, a chromosome, a gene, a promoter, an enhancer, a telomere, an intron, an exon, a splice site, an untranscribed region, an untranslated region, a transcribed region, a translated region, a transcription initiation site, a translation initiation site, a termination codon, a polyadenylation signal, a centromer, or any other structure or element found in the genome. A mutation may comprise, in certain embodiments, an engineered or recombinant polynucleotide of at least 500 base pairs, at least 1000 base pairs, at least 2000 base pairs, at least 5000 base pairs, at least 10000 base pairs, or at least 20000 base pairs.

[0018] An engineered genomic mutation of the current invention, in certain embodiments, comprises a mutation that is caused through human influence or intervention. For example, any human effort that increases the probability of a mutation is contemplated. In certain preferred embodiments, an engineered genomic mutation results from an assay or technique known in the field of biotechnology, molecular biology or genetic engineering, or any other discipline engaged in the manipulation of a mammalian genome. Where a mutation is engineered into the genome of a cell or an animal, off-spring of said cell or animal are also contemplated as carrying said engineered genomic mutation.

[0019] A mouse library of the current invention may be maintained, kept or stored, in certain embodiments, as a collection of living animals, a collection of ES cells, a collection of eggs, a collection of fertilized eggs, a collection of gametes, a collection of morulae, a collection of blastocysts, a collection of embryos, a collection of oocytes, a collection of fetuses, or a collection of cells of any cell type or cell aggregate that is capable of generating a mouse. Such a collection would comprise, in certain embodiments, each engineered genomic mutation so that a mouse of each mouse line of the mouse library may be generated. A mouse library of the current invention may be stored, in certain embodiments, through cryopreservation. In certain embodiments, cryopreservation is not used to store a living animal. Methods for cryopreservation useful to store a mouse library of the current invention are known in the art and are described, for example, in U.S. Pat. Nos. 5,962,213; 6,361,934; 6,500,608; 6,503,698; 6,519,954; and in Van den Abbeel et al., 1994, Cryobiology 31(5):423-33; Dumoulin et al., 1994, Fertil Steril. 62(4):793-8; Vasuthevan et al., 1992, J. Assist. Reprod. Genet. 9(6):545-50; Thornton et al., 1999, Mamm. Genome 10(10):987-92; Songsasen and Leibo, 1997, Cryobiology 35(3):255-69; Songsasen and Leibo, 1997, Cryobiology 35(3):240-54; Songsasen et al., 1997, Biol. Reprod. 56(1):143-52; Critser and Mobraaten, 2000, ILAR J. 41(4):197-206; Kasai and Mukaida, 2004, Reprod. Biomed. Online 9(2):164-170; Menezo, 2004, Obstet. Gynecol. Reprod. Biol. 115 Suppl 1:S12-5; Sztein et al., 2001, Cryobiology 42(1):28-39; Sztein et al., 1999, Lab.-Anim.-Sci. 49(1):99-100; Sztein et al., 1998, Biol.-Reprod. 58(4):1071-4, all of which are incorporated herein by reference for all purposes.

[0020] Mutations and ways of engineering mutations into a mouse genome are also described in U.S. Patent Application Nos. 20020182724, 20040072243, 20040259253, 20050059060, 20050053953; and in U.S. Pat. Nos. 6,080,576; 6,136,566; 6,207,371; 6,218,123; 6,436,707; 6,776,988; 6,808,921; 6,855,545, all of which are incorporated herein by reference for all purposes.

### 6.1.1 Generating Mouse Libraries of the Current Invention

[0021] A mouse library of the current invention, in certain embodiments, is generated by engineering a genomic mutation into a plurality of mice. A genomic mutation is engineered into a mouse, in certain embodiments, by engineering said mutation into a cell, and preferably into a cell that is useful to generate a mouse. In certain embodiments, a mutation is engineered into a gamete, a fertilized egg, a stem cell, an embryonic stem cell, a hematopoietic stem cell, or any other type of cell useful for generating a mouse. Examples of cell lines useful for generating a mouse include AB 2.2, HES-1, J1, CGR-8, R1, E14.1, E14TG2a. See, for example, U.S. Pat. Nos. 6,875,607; 6,867,035; 6,878,542; 6,815,185; 6,884,622 for cell lines, all of which are incorporated herein by reference for all purposes.

[0022] A genomic mutation, in certain embodiments, is engineered by introducing an oligonucleotide or a polynucleotide into a cell that is useful to generate a mouse. A useful nucleotide, oligonucleotide, or polynucleotide may be naturally occurring or not naturally occurring. In certain preferred embodiments, DNA, RNA, or any kind of derivative of either one, is introduced into a cell useful to generate a mouse. A DNA or RNA, or derivative of either, useful for introduction into a cell, in certain embodiments, is a vector, a virus, a construct, a replacement vector, an integration vector, a linear molecule, a circular molecule. A polynucleotide useful for engineering a genomic mutation into a cell, in certain embodiments, comprises one, two, three, or more of a marker, a marker facilitating the survival of a cell, a marker facilitating the killing of a cell, a stretch of genomic sequence, a splice donor site, a splice acceptor site, a multi-cloning site, a poly-adenylation signal, a transcription initiation site, a translation initiation site, an intron, an exon, vector sequences or any other element desired for engineering a desired genomic mutation. A stretch of genomic sequence may, in certain embodiments, have a length of 0 to 1 million bases, or 0.5 to 2 million bases, 0.2 to 20.0 kilobases, 0.2 to 5.0 kilobases, or 1.0 to 10.0 kilobases. Examples of vectors are Bluescript, pUC, or any other vector that facilitates the cloning, manipulation, sequencing, identification, isolation, amplification, and/or purification of a polynucleotide. See, for example, U.S. Pat. Nos. 6,815,185; 6,884,622 for background on designing, manipulating and cloning polynucleotides, all of which are incorporated herein by reference for all purposes.

[0023] In certain embodiments, a genomic mutation of the current invention is engineered by introducing a vector as shown in one or more of FIGS. 1 through 20 into a mouse cell, for example, an embryonic stem cell. A vector as shown in each of FIGS. 1 through 20 is referred to as a gene trap vector. In certain preferred embodiments, a gene trap vector may integrate into a gene in the genome of a cell. In certain other preferred embodiments, the integration of a gene trap vector into a gene results in a transcript from that gene comprising vector sequences and gene sequences (hybrid transcript). In certain other preferred embodiments, a hybrid transcript results from a gene with an integrated gene trap vector after transcription of the gene and before and following splicing of the transcript. Elements of gene trap vectors useful for making a mouse or cell of the current invention are known to those of skill in the art, for example, a mouse PGK promoter is discussed in Adra et al., 1987, Gene 60(1):65-74; a mouse BTK sequence is discussed in Sideras et al., 1994, J. Immunol. 153(12):5607-17; an SABgeo sequence and a splice acceptor sequence from adenovirus are discussed in Friedrich and Soriano, 1991, Genes Dev. 5(9): 1513-23; a pGen (MoMuLV backbone) sequence is discussed in Soriano et al., 1991, J. Virol. 65(5):2314-9; a bGH polyadenylation sequence and a SV40 polyadenylation sequence are discussed in Pfarr et al., 1986, DNA 5(2): 115-22, a polyadenylation signal from the major viral coat protein 1 gene of the SV40 virus is discussed in Maxwell et al., 1989, Biotechniques. 7(3):276-80, all of which are incorporated by reference.

[0024] In certain other preferred embodiments, a mutation is engineered into a cell that is maintained in culture or any environment that allows the manipulation of large numbers of cells and that allows the screening and identification of cells with desired characteristics, for example, cells that comprise an engineered genomic mutation of interest. In certain other embodiments, cells are maintained, grown, manipulated, screened and/or identified using one, two, three, four, or more different cultures, media, environments, buffers, sera, salts, and supports. See, for example, U.S. Pat. Nos. 6,875,607; 6,878,542; 6,815,185 for background on tissue culture, all of which are incorporated herein by reference for all purposes.

[0025] In certain other embodiments, a genomic mutation is engineered into a mouse by introducing said mutation into the cells of a mouse. For example, an oligonucleotide or a polynucleotide may be introduced into the cells of a mouse by any means capable of such delivery, for example, a virus, a liposome or any other means known in the art.

[0026] Background on generating a mouse library, including cloning, tissue culture, mutagenesis and generating mice, is also described in U.S. Patent Application Nos. 20020182724, 20040072243, 20040259253, 20050059060, 20050053953; and in U.S. Pat. Nos. 6,080,576; 6,136,566; 6,207,371; 6,218,123; 6,436,707; 6,776,988; 6,808,921; 6,855,545, all of which are incorporated herein by reference for all purposes.

### 6.1.2 Characterizing Mice of the Libraries of the Current Invention

[0027] Mice of a library of the current invention, in certain embodiments, are characterized by analyzing mouse lines comprising said library. A mouse line, in certain embodiments, consists of mice that are related as off-spring. In certain other embodiments, a mouse line consists of mice that comprise the same engineered genomic mutation. A mouse line, in certain embodiments, comprises mice that are homozygous or heterozygous for the same engineered genomic mutation, mice that are chimeras comprising cells that comprise that same engineered genomic mutation, and mice that are off-spring (or progeny) of such homozygotes, heterozygotes or chimeras, including wild-type off-spring that does not carry the same engineered genomic mutation. A mouse of each of these aforementioned types that is part of a mouse line of the invention is referred to herein as Homozygote, Heterozygote, Chimera, Off-Spring or Wild-Type. In certain embodiments, at least 50 percent of all mouse lines comprising a library of the invention are characterized, in certain other preferred embodiments, at least 75 percent or all mouse lines of such a library are characterized.

[0028] A mouse line of the present invention, in certain embodiments, is characterized by analyzing a Homozygote, a Heterozygote, a Chimera, an Off-Spring, and a Wild-Type of said mouse line, or any one, two, three or four thereof. In certain embodiments, at least one Homozygote, one Heterozygote and one Wild-Type mouse is analyzed, or at least two of each of the three types, at least three, at least four, at least five, at least eight, at least ten, or at least twenty. A mouse is characterized, in certain embodiments, by analyzing any aspect of the mouse or relating to the mouse. In certain embodiments, a mouse is characterized by analyzing all or a part of its structure, function, anatomy, physiology, genetics, genome, gene expression, cell growth, tumorigenesis, development, embryology, behavior, movement, susceptibility to disease, life span, weight, skeleton, or any other aspect of the mouse. A Homozygote or Heterozygote mouse of the current invention is characterized by at least identifying a gene affected by an engineered genomic mutation of said mouse.

### 6.1.2.1 Genetic Analysis

[0029] A mouse of the invention, in certain embodiments, is analyzed genetically. A preferred genetic analysis comprises determining or identifying any change or changes in the genome of a mouse comprising an engineered genomic mutation when compared to a mouse that does not comprise such a mutation. A genetic analysis, according to certain embodiments, comprises identifying a part of the genome affected by the engineered mutation, isolating a part of the genome comprising the engineered mutation, cloning a part of the genome comprising the engineered mutation, sequencing DNA, sequencing RNA, performing a restriction analysis, determining the site where an exogenous polynucleotide integrated into the genome, determining the presence of a rearrangement of parts of the genome, determining if a part of the genome has been deleted, determining if a part of the genome has been multiplied, determining if a part of the genome has been modified, or determining if any other kind of change has occurred to the genome of a mouse of the invention. See, for example, U.S. Pat. Nos. 6,875,607; 6,867,035; 6,878,542; 6,815,185; 6,884,622 for background on cloning.

[0030] Background on genetic analysis is also described in U.S. Patent Application Nos. 20020182724, 20040072243, 20040259253, 20050059060, 20050053953; and in U.S. Pat. Nos. 6,080,576; 6,136,566; 6,207,371; 6,218,123; 6,436,707; 6,776,988; 6,808,921; 6,855,545, all of which are incorporated herein by reference for all purposes.

### 6.1.2.2 Transcriptional Analysis

[0031] A mouse of the invention, in certain embodiments, is analyzed by performing a transcriptional analysis. A transcriptional analysis, according to certain embodiments, comprises determining the activity of any part of the genome of a mouse, for example, the activity of one or more genes. A transcriptional analysis, according to certain embodiments, comprises determining the quantity, stability, structure, location, sequence, modification, binding, or folding of RNA, for example, mRNA, hnRNA, tRNA, rRNA, or any other kind of RNA.

[0032] A transcriptional analysis comprises, in certain preferred embodiments, identifying an RNA molecule found in a mouse carrying the engineered genomic mutation but not in a mouse of the same strain not carrying that mutation (“mutated RNA”). In certain embodiments, a mutated RNA results from transcription of a part of the genome altered by the engineered genomic mutation, for example, if the engineered mutation resulted in the insertion of an exogenous sequence into an exon of a gene, transcription of that gene would result in an RNA molecule that includes the exogenous sequence. Or, for example, where the engineered mutation inserts exogenous exon sequences and one or more splice sites into a gene (for example, an exogenous exon with a splice acceptor site upstream and a splice donor site downstream may integrate into an intron) transcription of that gene would result in an RNA molecule that includes the exogenous exon sequences and the splice sites (“mutated hnRNA”). A mutated hnRNA, in certain embodiments, would undergo splicing to yield mature RNA molecules found in a mouse with an engineered genomic mutation (“mutated mRNA”) but not in a Wild-Type mouse (for example, the mutated mRNA would include an exogenous exon sequence that is not found in mRNA resulting from the non-mutated gene).

[0033] Background on transcriptional analysis is also described in U.S. Patent Application Nos. 20020182724, 20040072243, 20040259253, 20050059060, 20050053953; and in U.S. Pat. Nos. 6,080,576; 6,136,566; 6,207,371; 6,218,123; 6,436,707; 6,776,988; 6,808,921; 6,855,545, all of which are incorporated herein by reference for all purposes.

### 6.1.2.3 Phenotypic Analysis

[0034] A mouse of the invention, in certain embodiments, is analyzed by performing a phenotypic analysis. A phenotypic analysis, according to certain embodiments, comprises an assessment or evaluation of the behavior, coat color, size, proportions, shape, skeleton, reflexes, blood, blood protein, blood composition, cholesterol level, life span, weight, organ size, organ shape, organ function, brain size, or any other phenotypic aspect.

### 6.1.2.4 Computational Analysis

[0035] A mouse of the invention, in certain embodiments, is analyzed by performing a computational analysis. A computational analysis, according to certain embodiments, comprises a comparison of data derived from a mouse, a mouse line or a mouse library of the current invention with data known in the art. In certain other embodiments, a computational analysis comprises a comparison of data derived from a mouse or a mouse line of the current invention with data obtained from another mouse or mouse line of the current invention.

[0036] A computational analysis, in certain embodiments, comprises a comparison of genomic data, sequence data, expression data, phenotypic data, behavioral data, and any other kind of data.

### 6.2 Mice of the Current Invention

[0037] The current invention provides, in certain embodiments, a mouse carrying an engineered genomic mutation and, in certain other embodiments, the current invention provides a mouse line of the mice of the current invention. A mouse of the current invention, in certain embodiments, may be a Homozygote, a Heterozygote, a Chimera, an Off-Spring or a Wild-Type.

[0038] A mouse of the current invention may be maintained, kept or stored, in certain embodiments, as a living animal, an ES cell, an egg, a fertilized egg, a gamete, a morula, a blastocyst, an embryo, an oocyte, a fetus, or a cell of any cell type or cell aggregate that is capable of generating a mouse. A mouse of the current invention may be stored, in certain embodiments, through cryopreservation. In certain embodiments, cryopreservation is not used to store a living animal. Methods for cryopreservation useful to store a mouse of the current invention are known in the art and are described, for example, in U.S. Pat. Nos. 5,962,213; 6,361,934; 6,500,608; 6,503,698; 6,519,954; and in Van den Abbeel et al., 1994, Cryobiology 31(5):423-33; Dumoulin et al., 1994, Fertil Steril. 62(4):793-8; Vasuthevan et al., 1992, J. Assist. Reprod. Genet. 9(6):545-50; Thornton et al., 1999, Mamm. Genome 10(10):987-92; Songsasen and Leibo, 1997, Cryobiology 35(3):25569; Songsasen and Leibo, 1997, Cryobiology 35(3):240-54; Songsasen et al., 1997, Biol. Reprod. 56(1):143-52; Critser and Mobraaten, 2000, ILAR J. 41(4):197-206; Kasai and Mukaida, 2004, Reprod. Biomed. Online 9(2):164-170; Menezo, 2004, Obstet. Gynecol. Reprod. Biol. 115 Suppl 1:S12-5; Sztein et al., 2001, Cryobiology 42(1):28-39; Sztein et al., 1999, Lab.-Anim.-Sci. 49(1):99-100; Sztein et al., 1998, Biol.-Reprod. 58(4):1071-4, all of which are incorporated herein by reference for all purposes.

[0039] Table 1 shows examples of mice carrying engineered genomic mutations of the current invention. Table 1 also includes a description of the phenotype of a mouse carrying each of the engineered genomic mutations in Table 1.

[0040] Background on mice is also described in U.S. Patent Application Nos. 20020182724, 20040072243, 20040259253, 20050059060, 20050053953; and in U.S. Pat. Nos. 6,080,576; 6,136,566; 6,207,371; 6,218,123; 6,436,707; 6,776,988; 6,808,921; 6,855,545, all of which are incorporated herein by reference for all purposes.

### 6.3 Cells of the Current Invention

[0041] The current invention further includes, in certain embodiments, cells carrying an engineered genomic mutation. A cell of the current invention includes, in certain embodiments, a stem cell, an embryonic stem cell, a hematopoietic stem cell, a progenitor cell, a fibroblast, a nerve cell, a muscle cell, an epithelial cell, a teratocarcinoma cell, any other cell type known in the art, a cell that is progeny of one of the mentioned cell types, a cell that is derived from one of the mentioned cell types through differentiation.

[0042] A cell of the current invention may be obtained, in certain embodiments, by engineering a mutation into the genome of such a cell, for example, a stem cell or an embryonic stem cell. A cell of the current invention may also be obtained, in certain embodiments, from a mouse of the current invention, for example, from a Homozygote, a Heterozygote, an Off-Spring, a Chimera, or a Wild-Type. In certain other embodiments, a cell of the current invention is progeny of a cell obtained from a mouse of the current invention, for example, from a Homozygote, a Heterozygote, an Off-Spring, a Chimera, or a Wild-Type.

[0043] Background on cells is also described in U.S. Patent Application Nos. 20020182724, 20040072243, 20040259253, 20050059060, 20050053953; and in U.S. Pat. Nos. 6,080,576; 6,136,566; 6,207,371; 6,218,123; 6,436,707; 6,776,988; 6,808,921; 6,855,545, all of which are incorporated herein by reference for all purposes.

### 6.4 Polynucleotides of the Current Invention

[0044] The current invention provides, in certain embodiments, a polynucleotide. In certain embodiments, a polynucleotide of the current invention is derived from a cell or a mouse of the current invention. In certain other embodiments, a polynucleotide of the current invention comprises one, more than one, or all exons and/or one, more than one, or all introns of a gene that is found in a Wild-Type of a mouse line of the current invention and that carries an engineered genomic mutation in a Homozygote of the same mouse line, or its complementary, or a fragment thereof, or a polynucleotide capable of hybridizing thereto under conditions of moderate stringency or high stringency. A polynucleotide of the current invention, in certain embodiments, encodes a polypeptide of the current invention. A polynucleotide of the current invention may be DNA, RNA or any modification or derivative thereof. A polynucleotide may be genomic DNA, cDNA, hnRNA, mRNA, or any combination thereof. A polynucleotide of the current invention is at least 50 base pairs in length, or at least 100 base pairs, or at least 200 base pairs, or at least 300 base pairs, or at least 400 base pairs, or at least 500 base pairs, or at least 1000 base pairs, or at least 2000 base pairs, or at least 5000 base pairs, or at least 10000 base pairs, or at least 20000 base pairs in length.

[0045] The identification, isolation, cloning, modification and other processing of polynucleotides and conditions for hybridization under various conditions, including moderate and high stringency, are described in United States Patent Application Number 20050059060, which is incorporated herein for that and any other purpose.

### 6.5 Polypeptides of the Current Invention

[0046] The current invention provides, in certain embodiments, a polypeptide. In certain embodiments, a polypeptide of the current invention is derived from a cell or a mouse of the current invention. In certain other embodiments, a polypeptide of the current invention comprises a polypeptide that is encoded by one, more than one, or all exons of a gene that is found in a Wild-Type of a mouse line of the current invention and that carries an engineered genomic mutation in a Homozygote of the same mouse line, or a fragment thereof. In certain other embodiments, a polypeptide of the current invention is encoded by a polynucleotide of the current invention. A polypeptide of the current invention may comprise any one or more or all of the naturally occurring amino acids, or any modification or derivative thereof. A polypeptide of the current invention is at least 10 amino acids in length, or at least 25 amino acids, or at least 50 amino acids, or at least 100 amino acids, or at least 200 amino acids, or at least 300 amino acids, or at least 500 amino acids in length.

[0047] The identification, isolation, modification and other processing of polypeptides are described in United States Patent Application Number 20050059060, which is incorporated herein for that and any other purpose.

### 6.6 Antibodies of the Current Invention

[0048] The current invention also provides antibodies. In certain embodiments, an antibody of the present invention is specific to an antigen or epitope which is absent in a mouse of the invention (Absent Antigen). In certain preferred embodiments, an Absent Antigen is absent in a Homozygote of a mouse line of the invention, but not absent in a Wild-Type of the same mouse line. In certain other embodiments, an Absent Antigen is synthesized in a cell of a Wild-Type of a mouse line of the invention, but not in a Homozygote of the same mouse line. In certain embodiments, an Absent Antigen is expressed by a gene in a Wild-Type of a mouse line of the invention but not a Homozygote of the same mouse line. In certain other embodiments, an Absent Antigen is encoded by a gene in a Wild-Type of a mouse line of the invention but not a Homozygote of the same mouse line.

[0049] In certain other embodiments, an antibody of the invention is raised in a mouse of the invention, for example, a Wild-Type, a Chimera, an Off-Spring, a Heterozygote, and preferably a Homozygote. In certain other embodiments, an antibody of the current invention may be changed or altered into another antibody type. For example, a mouse antibody may be altered into a humanized antibody with the same antigen specificity, or any other type of alteration may be carried out. Antibody types contemplated under the current invention include, but are not limited to, polyclonal, monoclonal, multispecific, human, humanized or chimeric antibodies, single chain antibodies, Fab fragments, F(ab′) fragments, fragments produced by a Fab expression library, anti-idiotypic (anti-Id) antibodies (including, e.g., anti-Id antibodies to antibodies of the invention), and epitope-binding fragments of any of the above. In certain embodiments, an antibody of the current invention binds an Absent Antigen with a binding affinity (Kₐ) of 10⁶ M⁻¹ or greater, preferably 10⁷ M⁻¹ or greater, more preferably 10⁸ M⁻¹ or greater, more preferably 10⁹ M⁻¹ or greater, more preferably 10¹⁰ M⁻¹ or greater, more preferably 10¹¹ M⁻¹ or greater, and most preferably 10¹² M⁻¹ or greater.

[0050] Background on antibodies, antibody generation, characterization, modification, and uses are also described in U.S. Patent Application Nos. 20020182724, 20040072243, 20040259253, 20050059060, 20050053953; and in U.S. Pat. Nos. 6,080,576; 6,136,566; 6,207,371; 6,218,123; 6,436,707; 6,776,988; 6,808,921; 6,855,545; 6,824,780; 6,827,934; 6,824,993; 6,767,541; 6,828,425, all of which are incorporated herein by reference for all purposes.

### 6.7 Therapeutic Utility

[0051] The present invention provides, in certain embodiments, efficient drug development or development of therapies, or both. A mouse or a cell of the present invention may be used to obtain drugs and therapies for treatment of disease. An antibody of the present invention, in certain embodiments, may be used for therapeutic applications. Therapeutic applications, for example of antibodies of the invention, include disease phenotypes and phenotypic traits as those shown in Table 1.

### 6.7.1 Using Mice and Cells to Identify Drug Targets

[0052] Drugs typically exert their therapeutic effects through molecular interactions of the drug molecule with one or more molecules of the patient (drug targets). Finding a drug target is assisted by identifying molecules that are connected with a disease phenotype. Molecules that are found to have a connection to a disease phenotype are candidate targets for new drug molecules. A mouse carrying a disrupted gene (Homozygote and/or Heterozygote) can be used to identify candidate drug targets, for example, by identifying in the mouse one or more phenotypic traits corresponding to one or more traits observed in connection with a disease. A candidate drug target may also be identified in a mouse, for example, by identifying a protein encoded by the disrupted gene. A candidate drug target may also be identified in a mouse, for example, by identifying a molecule of the mouse which interacts with a protein encoded by the disrupted gene. A candidate drug target may also be identified in a mouse, for example, by identifying a molecule of the mouse that is found in a Homozygote or Heterozygote in an amount that is higher or lower, preferably at least two times, three times, four times, five times or ten times higher or lower in a Homozygote or Heterozygote than in a Wild-Type.

[0053] Where a Homozygote or Heterozygote is found to have one or more phenotypic traits observed in connection with a disease, one may identify a candidate drug target in a cell derived from said Homozygote or Heterozygote. A candidate drug target may be identified in a cell derived from a Homozygote or Heterozygote, for example, by identifying a molecule of the cell which interacts with a protein encoded by the disrupted gene. A candidate drug target may also be identified in a cell derived from a Homozygote or Heterozygote, for example, by identifying a molecule of the cell derived from a Homozygote or Heterozygote in an amount that is higher or lower, preferably at least two times, three times, four times, five times or ten times higher or lower in a cell derived from a Homozygote or Heterozygote than in a cell of corresponding type derived from a Wild-Type.

### 6.7.2 Using Mice and Cells to Validate Drug Targets

[0054] Where a molecule of a mouse is believed to be a potential drug target, a Homozygote or Heterozygote can be used to validate the molecule as a drug target. For example, a modulator of the potential drug target can be administered to a Wild-Type, a Homozygote and/or a Heterozygote of the same mouse line. For example, where a medically relevant effect of the modulator is observed in the Wild-Type mice and that effect is not observed, or observed to a significantly lesser degree, in a Homozygote and/or a Heterozygote, it would help to validate the potential drug target; for example, it would support a conclusion that the product of the disrupted gene is a drug target. Or, for example, where one or more phenotypic traits found in a disease are found in a Homozygote or Heterozygote and one or more of those traits are partially or completely compensated for by delivering the product of the disrupted gene to the Homozygote or Heterozygote, it would also help to validate the potential drug target, especially where no such compensation is observed in a Wild-Type mouse. A gene product may be delivered to a Homozygote, Heterozygote or Wild-Type by any means known to those of skill in the art, for example, by administration into the blood stream of the animal or by oral administration, or by introducing a transgene encoding the product into a Wild-Type, Homozygote or Heterozygote. Delivery of a gene product to a Wild-Type, Homozygote or Heterozygote may be temporary or long-term, preferably long enough so the gene product may exert an effect in the animals.

[0055] A cell derived from a Homozygote or Heterozygote may also be used to validate a molecule as a drug target. For example, a modulator of the potential drug target can be administered to a cell derived from a Wild-Type, a Homozygote and/or a Heterozygote of the same mouse line. For example, where a medically relevant effect of the modulator is observed in a cell derived from the Wild-Type mice and that effect is not observed, or observed to a significantly lesser degree, in a cell derived from the Homozygote and/or a Heterozygote, it would help to validate the potential drug target. Or, for example, where one or more phenotypic traits found in a disease are found in a cell derived from a Homozygote or Heterozygote and one or more of those traits are partially or completely compensated for by delivering the product of the disrupted gene to the cell, it would also help to validate the potential drug target, especially where no such compensation is observed in a cell derived from a Wild-Type mouse. A gene product may be delivered to a cell derived from a Wild-Type, Homozygote or Heterozygote by any means known to those of skill in the art, for example, by administration the gene product in cell culture or by transfecting a DNA construct capable of expressing said gene product into said cell culture. Delivery of a gene product to a cell derived from a Wild-Type, Homozygote or Heterozygote may be temporary or long-term, preferably long enough so the gene product may exert an effect in the animals.

### 6.7.3 Using Mice and Cells to Identify Drug Candidates

[0056] A mouse and a cell of the invention may also be used to identify a drug candidate. For example, a mouse or a cell of the invention may be used to identify a molecule capable of modulating, and preferably ameliorating, one or more phenotypic traits relevant to one or more diseases in humans or animals. Such modulation or amelioration may be partial or complete. Or, for example, a mouse or a cell of the invention may be used to identify a drug candidate molecule that does not exert adverse effects (side effects) on the mouse or cell to any extent or to an extent that would render the drug candidate too risky for evaluation in clinical studies. In these applications, it is preferred to compare the effect of the drug candidate in a Wild-Type with its effect in a Homozygote and/or Heterozygote of a mouse line of the invention, and/or in a cell derived from a Wild-Type, Homozygote and Heterozygote. A preferred drug candidate is capable of exerting desirable modulating or ameliorating effects in a Homozygote and/or Heterozygote mouse, or a cell derived therefrom, but is not capable or to a significantly lesser degree, of exerting such effects in a Wild-Type, or cell derived therefrom. A drug candidate may be administered to a Wild-Type, Homozygote or Heterozygote, or a cell derived from a Wild-Type, Homozygote or Heterozygote, by any means known to a skilled artisan including, but not limited to, infusion, injection, oral administration, adding the drug candidate to a cell culture. Upon administration of the drug candidate, changes in phenotypic traits are observed and a drug candidate capable of modulating one or more phenotypic traits in a Homozygote or Heterozygote, or a cell derived from a Homozygote or Heterozygote, would be a candidate, especially if the candidate did not or to a significantly lesser degree, exert such a modulation of one or more phenotypic traits in a Wild-Type of the same mouse line, or a cell derived from a Wild-Type.

### 6.7.4 Using Mice and Cells to Optimize Drug Candidates

[0057] A mouse and a cell of the invention may also be used to optimize a drug candidate. For example, a mouse or a cell of the invention may be used to test molecular variations of a drug candidate to identify a variant that is better capable (i.e., better than a candidate previously known) of modulating, and preferably ameliorating, one or more phenotypic traits relevant to one or more diseases in humans or animals. Such modulation or amelioration may be partial or complete. A mouse or a cell of the invention may also be used to test molecular variations of a drug candidate to identify a variant that exerts lesser and/or fewer adverse effects on the mouse or cell than a variant of the drug candidate previously known. In these applications, it is preferred to compare the effect of a variant of a drug candidate in a Wild-Type with its effect in a Homozygote and/or Heterozygote of a mouse line of the invention, and/or in a cell derived from a Wild-Type, Homozygote and Heterozygote. A preferred drug candidate variant is capable of better exerting desirable modulating or ameliorating effects in a Homozygote and/or Heterozygote mouse, or a cell derived therefrom, and that is less capable of exerting such effects in a Wild-Type, or cell derived therefrom, when compared to a drug candidate previously known. A drug candidate variant may be administered to a Wild-Type, Homozygote or Heterozygote, or a cell derived from a Wild-Type, Homozygote or Heterozygote, by any means known to a skilled artisan including, but not limited to, infusion, injection, oral administration, adding the drug candidate to a cell culture. Upon administration of the drug candidate variant, changes in phenotypic traits are observed and a drug candidate variant more capable of modulating one or more phenotypic traits in a Homozygote or Heterozygote when compared to a drug candidate previously known, or a cell derived from a Homozygote or Heterozygote, would be a more desirable candidate variant, especially if the candidate variant did not or to a significantly lesser degree, exert such a modulation of one or more phenotypic traits in a Wild-Type of the same mouse line, or a cell derived from a Wild-Type.

### 6.7.5 Using Mice and Cells to Validate a Drug Delivery Method or Vehicle

[0058] The effectiveness of a drug depends in part on its ability to access the organ, cells and/or organelles (site of disease) where the disease of interest exerts its pathological effects. Drug delivery to the site of disease is therefore one aspect in the development of a new drug therapy. Drug delivery may be affected by physiological changes due to disease and it is therefore useful to validate a drug delivery method or drug delivery vehicle (delivery method) or test a new drug delivery method or vehicle, for example, before its use in human patients. A delivery method may be tested by administering a molecule known to exert an effect at a site of disease, i.e., an organ, cell and/or organelle relevant to the treatment of a disease of interest, preferably a molecule where the effect is independent of the disease. Such a molecule with a known effect at a site of disease may be administered to a Wild-Type, Homozygote and/or Heterozygote of a mouse line of the invention, and/or in a cell derived from a Wild-Type, Homozygote and Heterozygote, and the effects are compared. Where the effects of a molecule with a known effect are observed in a Wild-Type mouse and/or a cell derived therefrom, and the effects are also observed at least to a significant degree in a Homozygote and/or Heterozygote, and/or a cell derived therefrom, that would support a conclusion that the phenotype of the Homozygote and/or Heterozygote did not affect the delivery of the molecule to the site of disease, or at least not to a significant degree. A mouse line used in such an application is preferably a line where the phenotype of the mice affects an organ, cell and/or organelle of a disease of interest.

### 6.7.6 Using Mice for the Generation of Antibodies

[0059] Mice of the current invention may be useful in therapeutic strategies involving, in certain embodiments, the preparation of human antibodies raised in a mouse of the invention. Raising a human antibody in a mouse of the invention may be carried out as known to those of skill in the art, for example, by preparing xenomice from a mouse of the invention through replacement of parts of the mouse genome responsible for antibody production with equivalent parts of the human genome responsible for antibody production. Mice obtained using this technique may be used in deriving antibodies with particularly strong therapeutic utility. Background on how to prepare a mouse capable of raising human antibodies and on raising human antibodies in mice is also described in U.S. Pat. Nos. 5,939,598; 6,075,181; 6,114,598; 6,130,364; 6,150,584; 6,162,963; 6,458,592; 6,657,103; 6,673,986; 6,833,268, all of which are incorporated herein by reference for all purposes.

### 6.8 Diagnostic Utility

[0060] The present invention provides, in certain embodiments, diagnostic tools. For example, a mouse or a cell of the present invention may be used, in certain embodiments, to diagnose the effectiveness of drugs, antibodies, or small molecules. An antibody of the present invention may be used, for example, to diagnose the presence or quantity of an antigen or epitope that the antibody is specific for, or a disease condition associated with a phenotype found in the animal in which the antibody is raised.

### 6.8.1 Using Mice and Cells to Validate Diagnostic Tools and Methods

[0061] A diagnostic tool or method may be validated using a mouse or cell of the invention. For example, where a device, molecule and/or method is believed to be useful in diagnosing a disease of interest, the device, molecule and/or method may be tested on a Homozygote or Heterozygote mouse and/or a cell derived therefrom. For example, a device, molecule and/or method that is believed to be diagnostically useful can be applied to a Wild-Type, a Homozygote and/or a Heterozygote of the same mouse line, or a cell derived therefrom. If diagnostic effectiveness is observed in a Homozygote and/or a Heterozygote but not, or to a significantly lesser degree, in a Wild-Type mouse, and/or a cell derived therefrom, it would support a conclusion that the diagnostic utility of the device, molecule and/or method is specific to the phenotype of the Homozygote or Heterozygote mouse and/or a cell derived therefrom. Of particular interest to a disease of interest are mouse lines with one or more phenotypic traits corresponding to one or more traits observed in connection with the disease of interest.

[0062] The present invention is further illustrated by the following examples, which are not intended to be limiting in any way whatsoever.

### EXAMPLES

### Example 1

### Generation of a Library of Mutated Mouse ES Cells Defined By GTS Sequences

[0063] Retroviral vectors such as those exemplified and described in detail in U.S. Pat. Nos. 6,080,576, 6,136,566, 6,139,833 were used to generate a collection of gene trapped ES cell clones. Plasmids containing various VICTR cassettes described above were constructed by conventional cloning techniques. Usually, the cassettes contained a PGK promoter directing transcription of an exon that ends in a canonical splice donor sequence. The transcript encoding the exon was engineered to contain sequences that allow for the annealing of two nested PCR and sequencing primers. The vector backbone was based on pBluescript KS+ from Stratagene Corporation.

[0064] The plasmid construct was linearized by digestion with, for example, ScaI, which cuts at a unique site in the plasmid backbone. The plasmid was then transfected into the mouse ES cell line AB2.2 by electroporation using a BioRad Genepulser apparatus. After the cells were allowed to recover, gene trap clones were selected by adding puromycin to the medium at a final concentration of 3 μg/ml (other antibiotics, such as G418, were used at suitable concentrations as applicable). Positive clones were allowed to grow under selection for approximately 10 days before being removed and cultured separately for storage and to determine the sequence of the disrupted gene.

[0065] Total RNA was isolated from an aliquot of cells from each of 18 gene trap clones chosen for study. Five micrograms of this RNA was used in a first strand cDNA synthesis reaction using the “RS” primer. This primer has unique sequences (for subsequent PCR) on its 5′ end and nine random nucleotides or nine T (thymidine) residues on it's 3′ end. Reaction products from the first strand synthesis were added directly to a PCR with outer primers specific for the engineered sequences of puromycin and the “RS” primer. After amplification, aliquots of reaction products were subjected to a second round of amplification using primers internal, or nested, relative to the first set of PCR primers. This second amplification provided more reaction product for sequencing and also provided increased specificity for the specifically gene trapped DNA.

[0066] The products of the nested PCR were visualized by agarose gel electrophoresis, and seventeen of the eighteen clones provided at least one band that was visible on the gel with ethidium bromide staining. Most gave only a single band, which is an advantage in that a single band is generally easier to sequence. The PCR products were sequenced directly after excess PCR primers and nucleotides were removed by filtration in a spin column (Centricon-100, Amicon). DNA was added directly to dye terminator sequencing reactions (purchased from ABI) using the standard M13 forward primer, a region for which was built into the end of the puro exon in all of the PCR fragments.

[0067] Subsequent studies have used both VICTR 3, VICTR 20 and follow-on vectors. Like VICTR 3, VICTR 20 is exemplary of a broader family of vectors that incorporate two main functional units: a sequence acquisition component having a strong promoter element (phosphoglycerate kinase 1) active in ES cells that is fused to the puromycin resistance gene coding sequence that lacks a polyadenylation sequence but is followed by a synthetic consensus splice donor sequence (PGKpuroSD); and 2) a mutagenic component that incorporates a splice acceptor sequence fused to a selectable, calorimetric marker gene and followed by a polyadenylation sequence (for example, SAβgeopA or SAIRESβgeopA). Also like VICTR 3, stop codons have been engineered into all three reading frames in the region between the 3′ end of the selectable marker and the splice donor site.

[0068] When VICTRs 3, 20, and various variations and modifications thereof were used in the commercial scale application of the presently disclosed invention; many mutagenized ES cell clones were rapidly engineered and obtained. Sequence analysis obtained from these clones has identified a wide variety of both previously identified and novel sequences.

[0069] The cloned 3′ RACE products resulting after the target ES cells were infected with VICTR 20 were purified using conventional column chromatography (e.g., S300 and G-50 columns), and the products were recovered by centrifugation. Purified PCR products were quantified by fluorescence using PicoGreen (Molecular Probes, Inc., Eugene Oreg.) as per the manufacturer's instructions.

[0070] Dye terminator cycle sequencing reactions with AmpliTaq® FS DNA polymerase (Perkin Elmer Applied Biosystems, Foster City, Calif.) were carried out using approximately 7 pmoles of sequencing primer, and approximately 30-120 ng of 3′ template. Unincorporated dye terminators were removed from the completed sequencing reactions using G-50 columns as described above. The reactions were dried under vacuum, resuspended in loading buffer, and electrophoresed through a 6% Long Ranger acrylamide gel (FMC BioProducts, Rockland, Me.) on an ABI Prism® 377 with XL upgrade as per the manufacturer's instructions. The sequences of the resulting amplicons, or GTSs, were recorded.

### Example 2

### Transfecting ES Cells

[0071] a. Vector Construction

[0072] The promoter from the mouse phosphoglycerate kinase (PGK) gene was placed upstream from the first exon of the naturally occurring murine btk gene (nucleotides 40,043 to 40,250 of the murine btk gene). The first exon of the btk gene does not contain a translational start site and initiation codon marking the 5′ region of the coding sequence; however, these features could be engineered into the exon if desired. The 3′ end of the coding region of the first exon is marked by a splice donor sequence. Given that splice donor recognition sequences can extend into intronic sequence, 103 bases of intron DNA was retained after the end of the btk first exon. The PGKbtkSD cassette lacks a 3′ polyadenylation signal. Accordingly, any transcript produced by the cassette cannot be properly processed, and therefore identified by 3′ RACE, unless the transcript is spliced to a 3′ exon that can be polyadenylated.

[0073] The above 3′ gene trap cassette was placed into a retroviral vector (in reverse orientation relative to the flanking LTR regions) that incorporated a polyadenylation site 5′ to the PGK promoter of the 3′ gene trap cassette, the neo gene was placed 5′ to the polyadenylation site, and a splice acceptor (SA) site was placed 5′ to the neo coding region to produce a functional SAneopA, or optionally a SAIRESneopA 5′ gene trap cassette. This vector also incorporates, in operable combination, a pair of recombinase recognition sites that flank the PGKbtkSD cassette. This vector typically requires that the target cell naturally express the trapped gene; however, this requirement can be overcome by adding a promoter that independently controls the expression of the selectable marker.

[0074] b. 3′ Gene Trapping

[0075] The btk vector was introduced into the embryonic stem cells using standard techniques. In brief, supernatant from GP+E packaging cells was added to approximately 2×10⁶ embryonic stem cells (at an input ratio of approximately 0.1 virus/target cell) for 16 hours and the cells were subsequently selected with G418 for 10 days. G418 resistant cells were subsequently isolated, grown up on 96-well plates and subjected to automated RNA isolation, reverse transcription, PCR and sequencing protocols to obtain the gene trapped sequences.

[0076] RNA Isolation was carried out on DNA bind plates (Corning/Costar) treated with 5′-amino (dT)₄₂ (GenoSys Biotechnologies) in a 50 mM Sodium Phosphate buffer, pH 8.6, and allowed to sit at room temperature overnight. Immediately prior to use the plates were rinsed three times with PBS and twice with TE. Cells were rinsed with PBS, lysed with a solution containing 100 mM Tris-HCl, 500 mM LiCl, 10 mM EDTA, 1% LiDS, and 5 mM DTT in DEPC water, and transferred to the DNA binding plate where the mRNA was captured. After a 15 minute incubation the RNA was washed twice with a solution containing 10 mM Tris-HCl, 150 mM LiCl, 1 mM EDTA, and 0.1% LiDS in DEPC water. The RNA was then rinsed three times with the same solution minus LiDS. Elution buffer containing 2 mM EDTA in DEPC water was added and the plate was heated at 70° C. for five minutes. An RT premix containing 2× First Strand buffer, 100 mM Tris-HCl, pH 8.3, 150 mM KCl, 6 mM MgCl₂, 2 mM dNTPs, RNAGuard (1.5 units/reaction, Pharmacia), 20 mM DTT, QT primer (3 pmol/rxn, GenoSys Biotechnologies, sequence: 5′ CCAGTGAGCAGAGTGACGAGGACTCGAGCTCAAGCTTTTTTTTTTTTTTTTT 3′, SEQ ID NO: 1) and Superscript II enzyme (200 units/r×n, Life Technologies) was added. The plate was transferred to a thermal cycler for the RT reaction (37° C. for 5 min. 42° C. for 30 min. and 55° C. for 10 min).

### Example 3

### Genetic Analysis of ES Cell Colonies

[0077] The cDNA was amplified using two rounds of PCR. The PCR premix contains: 1.1×MGBII buffer (74 mM Tris pH 8.8, 18.3 mM Ammonium Sulfate, 7.4 mM MgCl₂, 5.5 mM 2ME, 0.011% Gelatin), 11.1% DMSO (Sigma), 1.67 mM dNTPS, Taq (5 units/r×n), water and primers. The sequences of the first round primers are: Pₒ 5′AAGCCCGGTGCCTGACTAGCTAG3′, SEQ ID NO: 2; BTKₒ 5′GAATATGTCTCCAGGTCCAGAG3′, SEQ ID NO: 3; and Qₒ 5′ CCAGTGAGCAGAGTGACGAGGAC3′, SEQ ID NO: 4 (pmol/rxn). The sequences of the second round primers are Pᵢ 5′CTAGCTAGGGAGCTCGTC3′, SEQ ID NO: 5; BTKᵢ 5′ CCAGAGTCTTCAGAGATCAAGTC3′, SEQ ID NO: 6; and Qᵢ 5′ GAGGACTCGAGCTCAAGC3′, SEQ ID NO: 7 (50 pmol/rxn). The outer premix was added to an aliquot of cDNA and run for 17 cycles (95° C. for 1 min. 94° C. for 30 sec., 58° C. for 30 sec 65° C. for 3.5 min). An aliquot of this product was added to the inner premix and cycled at the same temperatures 40 times.

[0078] The nested 3′ RACE products were purified in a 96-well microtiter plate format using a two-step protocol as follows. Twenty-five microliters of each PCR product was applied to a 0.25 ml bed of Sephacryl® S-300 (Pharmacia Biotech AB, Uppsala, Sweden) that was previously equilibrated with STE buffer (150 mM NaCl, 10 mM Tris-HCL, 1 mM EDTA, pH 8.0). The products were recovered by centrifugation at 1200×g for 5 minutes. This step removes unincorporated nucleotides, oligonucleotides, and primer-dimers. Next, the products were applied to a 0.25 ml bed of Sephadex® G-50 (DNA Grade, Pharmacia Biotech AB) that was equilibrated in MilliQ H₂O, and recovered by centrifugation as described earlier. Purified PCR products were quantified by fluorescence using PicoGreen (Molecular Probes, Inc., Eugene Oreg.) as per the manufacturer's instructions.

[0079] Dye terminator cycle sequencing reaction with AmpliTaq® FS DNA polymerase (Perkin Elmer Applied Biosystems, Foster City, Calif.) were carried out using 7 pmoles of primer (Oligonucleotide OBS; 5′ CTGTAAAACGACGGCCAGTC3′, SEQ ID NO: 8) and approximately 30-120 ng of 3′ RACE product. The cycling profile was 35 cycles of 95° C. for 10 sec, 55° C. for 30 sec, and 60° C. for 2 min. Unincorporated dye terminators were removed from the completed sequencing reactions using G-50 columns as described earlier. The reactions were dried under vacuum, resuspending in loading buffer, and electrophoresed through a 6% Long Ranger acrylamide gel (FMC BioProducts, Rockland, Me.) on an ABI Prism® 377 with XL upgrade as per the manufacturer's instructions.

[0080] The automated 96-well format was used to obtain sequence, and data was obtained from 70% of the colonies. Upon examination, the sequence from the first exon of btk was identified followed by the btk splice junction. The splice junction was followed by unique sequences from each separate gene trap event. These sequences averaged 500 bp in length and were of high quality often containing long open reading frames. In addition 80% of these sequences can be matched using blast searches to sequences found in the GenBank database indicating that transcribed exonic sequences were identified. These gene trap sequence tags are of significantly better length and quality than those produced by previous gene trap designs. The new tags are improved in both length and quality and the fact that 80% of the tags match GenBank sequences suggests that they efficiently trap genes.

### Example 4

### Using ES Cells to Generate Mice

[0081] ES cells of the current invention are used to generate a mouse of the current invention. Any technique known in the art can be employed to generate a mouse with an ES cell. For example, an ES cell can be used to generate a mouse by injecting the cell into a blastocyst as described, for example, in Bradley, 1987. In: Teratocarcinomas and Embryonic Stem Cells: A Practical Approach, Robertson, ed. IRL, Oxford, pp. 113-152. Blastocysts can be isolated from a pregnant mouse on day 3.5 of pregnancy. About 20-25 ES cells are typically injected into a blastocyst. Following injection, the blastocyst is implanted into a suitable pseudopregnant female foster animal and the embryo brought to term. Progeny of the foster animal are used to breed more animals. If an ES cell harboring the engineered genomic mutation entered the germline of the foster animal's Off-Spring, the mutation will be represented in the Off-Spring's gene pool. Animals are bred to obtain a Homozygote, Heterozygote, Chimera, Off-Spring and/or Wild-Type animal. One may determine if an ES cell carrying an engineered genomic mutation of interest has entered the germline by observing the coat color of Off-Spring mice. As the ES cells are derived from an agouti coat color strain and the blastocyst from a black coat color strain, second or higher generation Off-Spring carrying agouti coat color would be indicative that an ES cell carrying the engineered genomic mutation has entered the germline. In addition, Off-Spring animals are examined genetically to detect the presence of the genetrap vector and to characterize the engineered genomic mutation.

[0082] Additional background on generating a mouse can also be found in, for example, Puhler, A., Ed., Genetic Engineering of Animals, VCH Publ., 1993; Murphy and Carter, Eds., Transgenesis Techniques Principles and Protocols (Methods in Molecular Biology, Vol. 18), 1993; and Pinkert, Calif., Ed., Transgenic Animal Technology: A Laboratory Handbook, Academic Press, 1994. Transgenic mice may also be generated, for example, as described in Thomas et al. (1999) Immunol., 163:978-84; Kanakaraj et al. (1998) J. Exp. Med., 187:2073-9; or Yeh et al. (1997) Immunity 7:715-725; Jaenisch (1988) Science, 240:1468-1474.

### Example 5

### Phenotypic Analysis of Mice

[0083] Functional annotation of the mammalian genome in the post-genome era is an important task. Genetic studies in model organisms provide an approach for understanding gene function. Technologies for parallel production and analysis of mouse mutants provides a valuable screen through mutations in druggable genes to identify targets for drug discovery. By carrying out genetic screens in a mammalian model system, one can screen directly for changes in physiology relevant to disease treatment. This example describes a biological screen for analyzing large numbers of mouse lines, for example, for screening 1000 mouse gene knockouts per year. This screen is focused on discovering the targets for therapeutic products in the areas of metabolism, endocrinology, immunology, neurology, cardiology, opthalmology, reproductive biology and oncology.

### 5.1 INTRODUCTION

[0084] Genetic screens can be used to scan a genome for genes that play a role in any process of interest. Genetic screens were carried out in invertebrate model organisms and included saturation screens of Drosophila Model Organisms in Drug Discovery. Ed. Pamela M. Carroll and Kevin Fitzgerald Copyright 2003 John Wiley & Sons, Ltd., to identify genes involved in organization of the body plan during development (Nusslein-Volhard and Wieschaus, 1980) and screens in Caenorhabditis elegans to identify genes involved in producing the invariant cell lineage pattern (Horvitz and Sulston, 1980; Chalfie et al., 1981; Hedgecock et al., 1983). These screens relied on saturation mutagenesis to interrogate the genome for the set of genes involved in these processes and led to the discovery of genes such as the homeobox genes and apoptosis regulators involved in development across all invertebrate and vertebrate species examined. Since these screens, additional genetic screens have been carried out in the fly and worm, further demonstrating the power of genetics for the dissection of pathways and processes. These screens require only a method for creating large numbers of tractable mutations in genes and a phenotype that can be measured.

[0085] Genetic screening has been adapted for the vertebrate model organisms of zebrafish and mice. In zebrafish, both chemical mutagenesis (Mullins et al., 1994; Haffter et al., 1996) and gene trapping (Golling et al., 2002) have been combined with phenotypic screens to identify mutations affecting development of the neural crest, pigmentation, jaw, branchial arches, visual system, heart and other internal organs, ear, retina, brain, midline, shape and movement (Brockerhoff et al., 1995; Abdelilah et al., 1996; Baier et al., 1996; Brand et al., 1996; Chen et al., 1996; Granato et al., 1996; Kelsh et al., 1996; Malicki et al., 1996a,b; Neuhauss et al., 1996; Odenthal et al., 1996; Piotrowski et al., 1996; Schier et al., 1996; Solnica-Krezel et al., 1996; Stemple et al., 1996). These screens take advantage of the large number of Off-Spring, oviparous development and transparent nature of the zebrafish embryo that make it a system for the study of vertebrate development that should result in the identification of genes involved in vertebrate development. For the purpose of drug discovery, effective genetic screens in mammals allow one to dissect mammalian physiology to identify key genes with therapeutic relevance as potential drug targets. Genetic screens in mammals are logistically possible with advances in mutagenesis and screening methods in mice that facilitate functional dissection of the mammalian genome. Advances in the scale and speed of gene targeting (Walke et al., 2001; Abuin et al., 2002) and the development of genome-wide gene trapping (Zambrowicz et al., 1998; Wiles et al., 2000; Leighton et al., 2001; Mitchell et al., 2001) in mouse embryonic stem cells resulted in mutations in a number of genes. The screen described in this example combines mouse screening methods with miniaturization of medical technologies and with disease challenge assays useful to the mouse model for diagnostic analysis of mice. The mouse is a model organism that is ideal for studying many aspects of mammalian physiology with direct medical relevance. Screens are used to identify genes involved in insulin sensitivity, hypertension, body fat deposition, energy expenditure, bone deposition and breakdown, angiogenesis and many other processes with significance for the treatment of disease.

[0086] These advances have brought together two aspects for genetic screens in mammals: the ability to produce large numbers of mutations and the ability to screen for phenotypes of interest. The development of mutagenesis strategies to mutate large numbers of mouse genes has been described (Zambrowicz et al., 1998; Wiles et al., 2000; Leighton et al., 2001; Mitchell et al., 2001). This example describes phenotypic screens designed to identify genes for use as targets to ameliorate diseases in the areas of diabetes/metabolism, cardiology, neurology, opthalmology, reproductive biology, oncology and immunology/inflammation.

### 5.2 SATURATING THE DRUGGABLE GENOME

[0087] One of the advantages of doing genetic screens in the mouse model system is the ability to measure directly the physiological parameters relevant to disease. These direct measures allow the identification of gene products that, when modulated by small-molecule drugs, provide a therapeutic effect. This approach is supported by the excellent correlation between the knock-out phenotypes of the targets of marketed pharmaceutical drugs and the known efficacy and side-effects of those drugs (Zambrowicz and Sands, 2003). An example is a knock-out of the H+/K+ATPase: the target of drugs such as Prilosec™ (AstraZeneca) used to lower gastric acid secretion for the treatment of gastric ulcer disease. Knock-out of either the alpha or beta subunit of ATPase results in animals with neutral stomach pH—a phenotype that correlates with the action of the pharmacological antagonists of ATPase (Scarff et al., 1999; Spicer et al., 2000). Similarly, mammalian screens can be set up to identify the genes that play a role in any specified therapeutic area. For instance, if one is interested in genes that may be important for the treatment of diabetes, it is possible to screen mutations in mice for direct effects on blood glucose and insulin levels, insulin sensitivity and other parameters such as obesity that play an important role in the diabetic process. There are genes involved in the regulation of glucose homeostasis, for example, the insulin receptor, which when mutated in mice results in animals with severe insulin resistance and frank diabetes (Accili et al., 1996; Joshi et al., 1996). Likewise, if one is interested in genes important for the treatment of osteoporosis, one can screen for mutations that increase or decrease bone mineral density, as observed for mice with mutations of the cathepsin K (Saftig et al., 1998) and osteoprotegerin genes (Bucay et al., 1998; Mizuno et al., 1998), respectively. This genetic approach is useful to analyze the role of a gene within the mammalian organism and its medical relevance.

[0088] The ability to measure parameters of mammalian physiology by screening in a mammalian organism stands in contrast to attempts to identify genes with disease relevance in lower model organisms such as Drosophila. The Drosophila system is useful for defining genetic pathways because of the ability to perform saturation screens for genetic modifiers of phenotypes that have been established already; yet, these genetic screens often are designed artificially and are removed from mammalian physiology. For instance, primary phenotypes to be used for modifier screens often are developed based upon overexpression, ectopic expression or expression of dominant or activated forms of a gene known to be involved in disease in the Drosophila eye (Therrien et al., 2000; Hirose et al., 2001; LaJeunesse et al., 2001; Schreiber et al., 2002; Sullivan and Rubin, 2002). Screens then are used to identify modifier genes that ameliorate or exacerbate the eye phenotype originally produced. These screens are able to elucidate genetic pathways and the types of genes that might play a role in a pathway of interest, but the corresponding mammalian genes still must be identified and tested for any relevance to the original disease or physiology of interest.

[0089] Saturation screens for genetic modifiers in non-mammalian organisms can provide clues for finding genes that may play a role in a disease-relevant pathway, but carrying out genetic screens directly in mammals for those genes is a preferred approach as more relevant to disease or physiology of interest. The question is whether the ability to scan a genome using saturation mutagenesis in invertebrate organisms outweighs the ability to screen directly in a more focused manner for genes that modulate disease-relevant mammalian physiology. Two of the challenges of conducting genetic screens in the mouse mammalian model have centered on the issues of the speed at which tractable genetic mutations can be generated and the large number of genes that must be processed to provide broad genomic coverage. While saturation modifier screens in mice need logistical support, it is possible to create mutations in all members of the so-called druggable classes of genes through gene targeting and gene trapping. This creates an opportunity to saturate the druggable mammalian genome, which is an important milestone in the evolution of drug discovery in the post-genome era. These druggable genes include secreted proteins that could be biotherapeutics themselves, potential targets for antibody-based therapeutics and small-molecule drug targets that belong to gene families that have proved themselves to be amenable to small molecule modulation based upon marketed drugs (Hopkins and Groom, 2002). The druggable genes include GPCRs (G-protein coupled receptors), ion channels, nuclear hormone receptors, key enzymes, kinases, proteases, secreted proteins and cell surface proteins. Indeed, one could argue that all mammalian disease or disease treatment pathways of interest probably contain druggable genes, so that by mutating all the druggable genes in the genome one can interrogate all pathways for points of therapeutic intervention.

[0090] Gene knock-out technologies were implemented on a large scale for saturation of the druggable genome. A program was instituted to knock out and analyze the resulting phenotypes for 5000 genes from the mammalian genome. The 5000 genes chosen are all members of druggable gene families. It was suggested that the druggable genome may be as small as about 3000 genes (Hopkins and Groom, 2002); therefore, screening 5000 genes is believed to be sufficient to saturate the mammalian druggable genome in order to identify those genes that have the greatest potential for disease treatment.

### 5.3 EFFECTIVELY SCREENING THE GENOME FOR NOVEL DRUG TARGETS

[0091] When generating knock-out mouse lines at a rate of 1000 per year, one needs a biological evaluation process that has a high probability of identifying potential drug targets, as assessed by the physiological consequences of gene disruption. A process that maximizes the potential to identify therapeutically significant genes was developed.

[0092] This screening process applies filters for genomic information. First, the genome is examined for members of druggable families. Second, knock-out mice are generated for selected genes at an average rate of 20 lines of mutant mice per week. A minimum cohort for initial evaluation is 16 animals; 8 Homozygous nulls, 4 Heterozygotes and 4 Wild-Type animals for each gene. This cohort size has produced reliable data from the primary screen upon which decisions for secondary screens can be made. This process involves the integration of bioinformatics, mouse genetics, robotics and high-speed physiological evaluation in an infrastructure with the ability to operate at the required rate. Generating, maintaining, genotyping and characterizing the required number of animals is logistically feasible.

[0093] An initial biological evaluation of the animals is a comprehensive clinical assessment of physiological parameters that can be measured effectively in high-throughput mode. Each test has relevance to one or more therapeutic areas and is designed to yield information that can be correlated directly with therapeutic intervention. This process includes an extensive battery of behavioral evaluations (neurology), blood pressure and heart rate measurements (cardiology) and a complete hematology survey supplemented with fluorescence-activated cell sorting (FACS) scans for immune function (immunology). The animals also are evaluated for body fat content, lean body mass (metabolism), bone mineral density, bone mineral content (endocrinology) and retinal integrity/vascularization (opthalmology). Effects on cell proliferation and reproductive organ development are studied (oncology) and fertility (reproductive biology) is assessed. This screening phase of biological investigation is referred to as Level 1 analysis.

[0094] This initial analysis of the physiological consequence of creating null mutations is designed to be unbiased with regard to potential outcome but to encompass phenotypes indicative of utility to our chosen therapeutic areas. All animals in all projects are submitted to the same tests in the same temporal sequence. This means that each test must be self-contained and have minimal impact on the outcome of subsequent tests. The aim of Level 1 analysis is to obtain a comprehensive understanding of gene function within the context of mammalian physiology. Variations from normal in any parameter are detected by comparison with cohort controls and with pooled historical data for all controls. Historical control data based on many animals give a good quantitative measure of normal values for each test and the level of background variation. Most of the tests are of primary importance to one particular therapeutic area (e.g. blood pressure and cardiology), but the total picture gained from this type of analysis is useful in identifying possible side-effects of target modulation. This allows the identification of targets with a potential for the development of target modulators.

[0095] In addition to therapeutic area-specific tests, multiple general diagnostic tests are performed. Level I pathology examines 52 tissues for the female and 53 tissues for the male. A complete gross necropsy is performed, with collection of tissues and photography of any significant gross lesions. Tissues are immersion-fixed in 10% neutral buffered formalin for 24 h, trimmed, processed to paraffin, embedded, sectioned at 4-5 mm, and stained with hematoxylin and eosin for histopathological examination. A board-certified pathologist examined tissues from one male and one female Homozygote for each project (Heterozygotes are examined for Homozygous lethal projects). Computer-assisted tomography (CAT) scanners operate effectively on mice and enable non-invasive evaluation of soft-tissue anatomy in addition to very refined skeletal analysis. Application of CAT (MicroCAT, ImTek Inc.) can be used to obtain morphological information non-invasively. All lesions are recorded and compared with controls in order to facilitate interpretation of phenotypes.

[0096] The output from all Level 1 tests is reduced to digital data and ported to a relational database. Data acquisition is rapid to the point that no Level 1 test is rate-limiting for the overall process. Numerical data is represented graphically with appropriate statistical tools, images are annotated by project scientists and interpretation of pharmaceutical relevance is summarized. It is therefore possible to gain a comprehensive view of the physiological function of every gene that is studied. This view encompasses those features that are most indicative of therapeutic potential in specific disease areas. Level 1 analysis has been a source of targets for drug discovery programs. Level 2 analysis entails the confirmation of Level 1 observations using additional animals and the application of specialized tests in a given project in reaction to Level 1 observations. Level 2 includes numerous therapeutic area-specific tests and challenge assays that cannot be used in the screening phase. Level 2 analysis may be triggered also through a hypothesis-driven approach. Level 3 analysis is designed for in-depth biological study in order to determine the merits of each target for assay development and high-throughput screening.

[0097] The decision to submit a given gene product to actual drug discovery is based on three criteria: modulation of the target by a small molecule, antibody or therapeutic protein could provide significant therapeutic effect with minimal or no discernable on-target side-effects; the target represents a potential breakthrough for the treatment of disease with significant advantages over existing therapies; and the program addresses a major unmet medical need. These criteria were applied to the analysis of multiple phenotypes and a number of projects were committed to further drug discovery following this analysis.

[0098] What follows is a brief description of the capabilities of the therapeutic area biology groups, including Level 1 and Level 2 tests that are most directly relevant to them.

### 5.4 HIGH-THROUGHPUT BIOLOGY

### Maximizing Return from Reverse Genetics

[0099] 5.4.1 Endocrinology/Metabolism

[0100] Three of the most prevalent diseases of endocrinology/metabolism are Type II diabetes, obesity and osteoporosis. A comprehensive panel of physiological tests was implemented for each disease process that have proved to provide reliable clinical descriptions of disease-related symptoms. These tests include measures of body composition index, glucose homeostasis and bone mass.

[0101] 5.4.1.1 Level 1 Diabetes Tests

[0102] 5.4.1.1.1 Glucose Tolerance Test

[0103] The glucose tolerance test (GTT) is the standard for defining impaired glucose homeostasis in mammals. For example, intraperitoneal glucose tolerance tests showed improved glucose clearance and the serum glucose and insulin levels were significantly lower in protein tyrosine phosphatase-1B (PTP-1B) and SHIP2 knock-out mice (Klaman et al., 2000; Clement et al., 2001). These findings indicate improved insulin sensitivity, a possibility that confirmed by hyperinsulinemic-euglycemic clamp studies in the PTP-1B knock-out mice (Klaman et al., 2000). These results suggest that these two proteins are targets for new therapeutics aimed at Type II diabetes. In addition, the ability of retinoid X receptor agonists to lower serum glucose and insulin levels is used as evidence that these agonists act as insulin sensitizers in vivo (Mukherjee et al., 1997). These examples validate the effectiveness of GTT for the identification of potential targets for diabetes. Glucose tolerance tests are performed using a Lifescan glucometer. Animals are injected i.p. with 2 g/kg D-glucose, delivered as a 20% solution, and blood glucose levels are measured at 0, 30, 60 and 90 min after injection (Klaman et al., 2000).

[0104] 5.4.1.1.2 Urinalysis

[0105] Elevated glucose and/or ketone levels in urine are diagnostic markers for diabetes. Qualitative urinalysis is performed using Chemstrip 10 UA reagent strips (Roche) for the detection of glucose, bilirubin, ketones, blood, pH, protein, urobilinogen, nitrites and leukocytes in urine. Results are recorded using a Chemstrip 101 urine analyser.

[0106] 5.4.1.1.3 Serum Insulin

[0107] Serum insulin levels are also diagnostic markers for diabetes. Insulin levels are assayed using a sensitive rat radioimmunoassay kit from Linco, which is sensitive to 0.02 ng/ml insulin in serum.

[0108] 5.4.1.2 Level 2 Diabetes Tests

[0109] In Level 2, other tests are performed to verify and further define the role of targets in glucose homeostasis, for example, insulin tolerance test; insulin levels during GTT; insulin clearance (serum c-peptide/insulin ratio); measurement of serum free fatty acids, glycerol, glucagon, leptin, corticosterone; insulin content of pancreatic islets (radioimmunoassay); immunohistochemical analysis of pancreas for insulin, glucagon, somatostatin and pancreatic polypeptide; muscle and liver pathology, including glycogen and lipid content; pharmacological evaluation of liver slices, isolated soleus muscle and adipocytes.

[0110] 5.4.1.3 Level 1 Obesity Tests

[0111] Animal weight and percent body fat are measured in Level 1 to identify obesity phenotypes.

[0112] 5.4.1.3.1 Body Weight

[0113] All mice are weighed at 2, 4, 6, 8 and 16 weeks of age.

[0114] 5.4.1.3.2 Dual-Energy X-Ray Absorptiometry

[0115] Dual-energy X-ray absorptiometry (DEXA) is used to identify increased total body fat in melanocortin-3 receptor knock-out mice (Butler et al., 2000) and decreased total body fat in melanin concentrating hormone 1 receptor knock-out mice; the latter observation was confirmed by direct analysis of fat pad weights (Marsh et al., 2002). Such results suggest these proteins as targets for novel obesity therapies. In addition, DEXA was used to show that the small-molecule insulin mimetic cpd2 blocks the accumulation of body fat in mice fed a high fat diet, an observation confirmed by direct analysis of fat pad weights (Air et al., 2002). A DEXA instrument (Lunar Piximus) is used to record bone mineral density, bone mineral content, percent body fat and total tissue mass (Nagy and Clair, 2000; Punyanitya et al., 2000). Although primarily aimed at metabolic and osteoporotic conditions, DEXA is a sensitive measure of all-round wellbeing and often contributes to diagnosis in other therapeutic areas.

[0116] 5.4.1.4 Level 2 Obesity Tests

[0117] In Level 2, obesity targets are analyzed to determine whether they regulate metabolism, feeding, appetite or food absorption. Level 2 obesity tests include, for example, metabolic cages to measure food intake, water intake and fat malabsorption; Mini-Mitter telemetry for physical activity, core body temperature, drinking frequency and feeding frequency and duratior; Oxymax measurement of metabolic rate and physical activity; home cage diet studies, including high-fat-diet challenge, food intake measurement and pair-feeding studies; fat mass by DEXA or nuclear magnetic resonance (Bruker Minispec); body composition analysis (analysis of carcass fat mass by Sohxlet; fat pad and organ weights); crosses to ob/ob mice; pharmacological challenge with leptin, melanocortin II and neuropeptide Y; blood pressure.

[0118] 5.4.1.5 Level 1 Osteoporosis Tests

[0119] 5.4.1.5.1 Bone Microcomputed Tomography

[0120] Osteoporosis is characterized by a decreased bone mineral density due to a deficiency in bone production or increased bone absorption resulting in brittle bones. Specialized microcomputed tomography (micro-CT) machines have been developed with the capacity to provide quantitative and imaging data on the three-dimensional structure of mouse bones. This technique is used to demonstrate the efficacy of parathyroid hormone in a mouse model of osteoporosis (Alexander et al., 2001) and is used to describe in three dimensions the changes in bone resulting from the osteopetrotic mutation, which leads to osteopetrosis (Abe et al., 2000). A Scanco Medical mCT40 machine is used for measurements of bone mineral density. This machine permits visualization of trabecular bone structure, which is critical in evaluating overall bone quality. This is a much more sensitive analysis of bone than can be achieved using DEXA alone and is a specialized test for osteoporosis that we have implemented as part of our Level 1 analysis.

[0121] 5.4.1.6 Level 2 Osteoporosis Tests

[0122] In Level 2, targets are analyzed to determine whether changes in bone mineral density are due to effects on bone deposition or bone resorption using various tests, for example, DEXA; micro-CT; undecalcified bone histomorphometry; bone histopathology; measurement of urinary helical peptide.

[0123] 5.4.2 Cardiology

[0124] The major disease areas of interest in cardiology are hypertension, thrombosis, atherosclerosis and heart failure.

[0125] 5.4.2.1 Level 1 Tests

[0126] 5.4.2.1.1 Blood Pressure

[0127] Blood pressure measurements facilitate finding targets that, upon inhibition, lead to a reduction in blood pressure. Angiotensin-converting enzyme inhibitors and angiotensin receptor antagonists are effective drugs in the treatment of hypertension. Both knock-outs have low blood pressure. Blood pressure is measured using a non-invasive computerized tail-cuff system, the Visitech Systems BP-2000. This technique is a validated approach (Krege et al., 1995; Ito et al., 1995; Oliver et al., 1998; Sugiyama et al., 2001). Ten measurements of blood pressure are made per day on each of 4 days for each animal evaluated. Results are recorded as the pooled average of 40 measurements.

[0128] 5.4.2.1.2 Zymosan Challenge Assay

[0129] Peritoneal leukocyte recruitment assays are used to identify targets that may regulate the inflammatory component of atherosclerosis. These assays detect abnormalities in immune cell recruitment to a site of inflammation. It has been shown in mutant such as C-C chemokine receptor 2 (CCR2) knock-outs that a defect in immune cell recruitment in these assays correlates well with a significant reduction in the inflammatory component of atherosclerosis and the subsequent plaque formation (Boring et al., 1997).

[0130] 5.4.2.1.3 Blood Lipids

[0131] High cholesterol and triglyceride levels are recognized risk factors in the development of cardiovascular disease. Measuring blood lipids facilitates finding the biological switches that regulate blood lipid levels; inhibition of these switches should lead to a reduction in the risk for cardiovascular disease.

[0132] 5.4.2.1.4 Optic Fundus Photography and Angiography

[0133] Optic fundus photography is performed on conscious animals using a modified Kowa Genesis small-animal-fandus camera (Hawes et al., 1999). Intraperitoneal injection of fluorescein permits the acquisition of direct light fundus images and fluorescent angiograms for each examination. In addition to direct opthalmological changes, this test can detect retinal changes associated with systemic diseases such as diabetes and atherosclerosis.

[0134] 5.4.2.2 Level 2 Cardiology Tests

[0135] Level 2 cardiology tests include, for example, platelet aggregation; vascular injury by carotid cuff; chemically induced thrombosis; Poloxamer-induced atherosclerosis; aortic banding; permanent coronary occlusion; crosses with apolipoprotein E, low-density lipoprotein receptor and knock-outs.

[0136] 5.4.3 Immunology

[0137] Our focus indications include acute inflammation, inflammatory bowel disease, transplantation, asthma, allergy, multiple sclerosis, rheumatoid arthritis and blood coagulation. The process of hematopoietic cell development and the regulation of mature immune cell function share several key signaling pathways, which are the result of similar molecular or cellular interactions. As an example, activation events via the antigen-specific T-cell receptor and co-stimulatory molecules are indispensable for both normal T cell development in the thymus and normal T-cell function during an immune response. Comprehensive phenotypic analysis of functionally relevant immune cell subpopulations in knock-out mice is essential for two reasons: it can reveal the role of a novel gene or expose the central role of a known gene in immune cell development and function; and at the same time it can provide the first hint about the potential mechanism that can lead to the observed immune deficiency.

[0138] 5.4.3.1 Level 1 Tests

[0139] 5.4.3.1.1 Complete Blood Cell Count

[0140] Evaluation of the cellular components of the immune system in knock-out mice and Wild-Type littermates is performed by automated determination of the absolute numbers of various cell types and ratios in the peripheral blood, i.e. complete blood cell count (CBC). This analysis is followed by a more detailed study using flow cytometry, which is designed to determine the relative proportions of CD4+ and CD8+ T cells, B cells, NK cells and monocytes in the mononuclear cell population. In the absence of a single molecular entity, disturbances in the proportion of any of the analyzed cell types could signal a key role for that molecule in governing the immune system, as exemplified in the following knock-out phenotypes.

[0141] The immunosuppressants cyclosporin A and FK506, which are useful to prevent transplant rejection, inhibit the immune response by inhibiting the catalytic activity of one or both isoforms of calcineurin A (can) in lymphocytes. Mice deficient in the b-isoform of the enzyme have a significant reduction in peripheral T lymphocytes due to 75% and 65% reductions in CD4+ and CD8+ positive thymocytes, respectively (Bueno et al., 2002). Mice deficient in expression of granulocyte colony-stimulating factor (G-CSF) exhibit chronic neutropenia with a 70-80% reduction in circulating neutrophils, whereas recombinant GCSF (Neupogen) stimulates neutrophil production and is used to treat neutropenia (Lieschke et al., 1994).

[0142] This test requires 135 μl of whole blood and employs a Cell-Dyn 3500R hematology analyzer. It reports on white blood cell count, neutrophils, lymphocytes, monocytes, eosinophils, basophils, red blood cell count and other standard hematology markers.

[0143] 5.4.3.1.2 Blood Chemistry

[0144] A Cobas Integra 400 serum analyzer is used to measure a range of soluble serum components using approximately 85 ml of serum. Serum levels are recorded for alkaline phosphatase, albumin, total cholesterol, triglycerides, blood urea nitrogen, glucose, alanine aminotransferase, bilirubin, phosphate, creatinine, calcium and uric acid.

[0145] 5.4.3.1.3 Fluorescence-Activated Cell Sorting (FACS)

[0146] Flow cytometry is designed to determine the relative proportions of CD4+ and CD8+ T cells, B cells, NK cells and monocytes in the mononuclear cell population. A Becton-Dickinson FACSCalibur 3-laser FACS machine is used to assess immune status. For Level 1 screening, this machine records CD4+/CD8−, CD8+/CD4−, NK, B cell and monocyte numbers, in addition to the CD4+/CD8+ ratio.

[0147] 5.4.3.1.4 Ovalbumin Challenge

[0148] Chicken ovalbumin (OVA) is a T-cell-dependent antigen used as a model protein for studying antigen-specific immune responses in mice. It is non-toxic and inert and therefore will not cause harm to the animals even if no immune response is induced. The murine immune response to OVA has been well characterized, to the extent that the immunodominant peptides for eliciting T-cell responses have been identified. Anti-OVA antibodies are detectable 8-10 days after immunization using enzyme-linked immunosorbent assay, and determination of different isotypes of antibodies gives further information on the complex processes that may lead to a deficient response in genetically engineered mice.

[0149] The cyclosporin-mediated suppression of immune response once again demonstrates the similarity of phenotype using the suppressive agent or the genetic knock-out mice in this challenge model. Both cyclosporin-treated animals and mice knocked out for calcineurin A, in this case the a-isoform, show deficiency in T-cell-dependent antigen response (Puignero et al., 1995; Zhang et al., 1996).

[0150] Another example is the cytokine tumor necrosis factor a (TNF-a), whose important role in modulating inflammatory and antibody responses is well known. Two treatment options are available for patients with rheumatoid arthritis, a soluble receptor (Enbrel) and antibody (Remicade), both based on blocking the TNF-a activity. Underlining the effectiveness of drug therapy, mice deficient in TNF-a exhibit impaired humoral response to both T-cell dependent and T-cell-independent antigens (Pasparakis et al., 1996).

[0151] It is important to note that, even without antigenic challenge, the make-up of the immunoglobulin repertoire in a knock-out mouse is highly informative, because isotype switching of immunoglobulins is dependent on the interaction between B and T lymphocytes. Examples of the type of receptors required for normal function of T and B cells are the so-called co-stimulatory molecules, including CD28 and CD40 receptors, both of which are targets of antibody-based therapy with ongoing clinical trials for the treatment of various autoimmune diseases. In this case, mice deficient in either of these receptors register an impairment in immunoglobulin class switching, which is detectable in the serum of the animals (Shahinian et al., 1993, Kawabe et al., 1994). The protocol assesses the ability of mice to raise an antigen-specific immune response. Animals are injected i.p. with 50 mg of OVA emulsified in Complete Feund's Adjuvant; 8 days later the serum titer of anti-OVA antibodies (IgG1 and IgG2 subclasses) is measured.

[0152] 5.4.3.2 Level 2 Immunology Tests

[0153] The following Level 2 tests are used to test for disease indication for a given target, for example, T-Cell activation, CD3 monoclonal antibody (mAb)+CD28 mAb induced; B-Cell activation, CD40 mAb+IL4 induced; mixed lymphocyte reaction provoked by irradiated BALB/C spleen cells; lipopolysaccharide challenge to evaluate acute phase response; Oxazolone sensitization and challenge for contact hypersensitivity; ovalbumin vaccine model; bovine collagen-induced arthritis; dextran sulfate gavage: inflammatory bowel disease model; ovalbumin+alum immunization followed by aerosol delivery of ovalbumin as asthma model; allograft rejection; blood coagulation assays: prothrombin time and activated partial thromboplastin; platelet aggregation; bone marrow transplantation.

[0154] 5.4.4 Neurology

[0155] Neurology focuses on the identification of targets for anxiety, depression, schizophrenia, pain, sleep disorders, learning and memory disorders, neuromuscular disease and neurodegenerative disorders. The Level 1 assays have been based upon the behavioral phenotypes associated with knock-outs of known central nervous system targets as well as the actions of known drugs.

[0156] 5.4.4.1 Level 1 Tests

[0157] 5.4.4.1.1 Open Field Test

[0158] Several targets of known drugs have exhibited phenotypes in the open field test. These include knock-outs of the serotonin transporter, the dopamine transporter (Giros et al., 1996), and the GABA receptor (Homanics et al., 1997). An automated open-field assay is used to address changes related to affective state and exploratory patterns related to learning. First, the field (40×40 cm) is relatively large for a mouse, which is designed to pick up changes in locomotor activity associated with exploration. In addition, there are four holes in the floor to allow for nose-poking, an activity specifically related to exploration. Several factors have been designed to heighten the affective state associated with this test. The open-field test is the first experimental procedure in which the mice are tested, and the measurements taken are the subjects' first experience with the chamber. In addition, the open field is brightly lit. All these factors will heighten the natural anxiety associated with novel and open spaces. Thus, pattern and extent of exploratory activity, especially the center-to-total distance traveled ratio, may be able to discern changes related to susceptibility to anxiety or depression. A large arena (40 cm×40 cm, VersaMax animal activity monitoring system from AccuScan Instruments) with infrared beams at three different levels is used to record rearing, hole poke and locomotor activity. The animal is placed in the center and its activity is measured for 20 min. Data from this test are analyzed in five 4-min intervals. The total distance traveled (cm), vertical movement number (rearing), number of hole pokes and the center-to-total distance ratio are recorded.

[0159] 5.4.4.1.2 Inverted Screen

[0160] This test is used to measure motor strength/coordination. Untrained mice are placed individually on top of a square (7.5 cm×7.5 cm) wire screen that is mounted horizontally on a metal rod. The rod is rotated 180° so that the mice are on the bottom of the screens. The following behavioral responses are recorded over a 1-min testing session: fell off, did not climb and climbed up.

[0161] 5.4.4.1.3 Functional Observation Battery

[0162] This is a modified SHIRPA (Rogers et al., 2001) analysis in which the animals are scored systematically for 37 individual behavioral and physical characteristics, such as vision, response to touch, palpebral closure, etc. It is a formalization of the complete observation of the whole organism, which often gives the first hint as to phenotype.

[0163] 5.4.4.1.4 Hot Plate and Formalin Paw

[0164] The 55° C. hot plate is a standard assay for measuring nociception in animals. Knock-out of either the m-opioid receptor (Sora et al., 1997) or COX 1 (Ballou et al., 2000) (both targets of analgesic drugs) results in effects on response latency in the hot-plate assay. Analgesia, such as that produced by morphine and other strong analgesics, is also detected using this assay. The hot-plate test is carried out by placing each mouse on a small, enclosed 55° C. hot plate (Hot Plate Analgesia Meter, Columbus instruments). Latency to a hind-limb response (lick, shake or jump) is recorded, with a maximum time on the hot plate of 30 s. Each animal is tested once.

[0165] The formalin paw assay is useful for hyperalgesia, as well as initial acute nociception. Recently, this assay has been automated and thus has become available for use in high-throughput analysis. Drugs that address novel mechanisms of hyperalgesia, without the side-effects of potent non-steroidal anti-inflammatory drugs, will be very useful new therapeutics.

[0166] 5.4.4.1.5 Prepulse Inhibition

[0167] Prepulse inhibition is a pre-attentive process that has been shown to be deficient in patients with schizophrenia. This reduced ability to filter out environmental stimuli may contribute to both positive and negative symptoms of the disease. Antipsychotics can ameliorate some deficits in prepulse inhibition, therefore genetic inhibition of a target that can increase prepulse inhibition may presage a small-molecule therapeutic that can help patients with their disorder. The prepulse inhibition of the startle response assay is an automated measure of the startle response both with and without various intensities of prepulses. Targets whose genetic inhibition produces changes in prepulse inhibition without changes in the startle response itself may be excellent for the discovery of new therapeutics.

[0168] This test employs a San Diego Instruments SR-lab startle response system. Prepulse inhibition of the acoustic startle reflex occurs when a loud 120 decibel (dB) startle-inducing tone is preceded by a softer (prepulse) tone. The prepulse inhibition paradigm consists of six different trial types (70 dB background noise, 120 dB alone, 74+120 dB at postpartum day 4, 78+120 dB at postpartum day 8, 82+120 dB at postpartum day 12, and 90+120 dB at postpartum day 20) each repeated in pseudorandom order six times for a total of 36 trials. The maximum response to the stimulus (Vmax) is averaged for each trial type. The percentage inhibition of the animal's response to the startle stimulus is calculated for each prepulse intensity and then graphed. This test is being used increasingly as a model of human schizophrenia and a test for antipsychotic drugs.

[0169] 5.4.4.1.6 Tail Suspension

[0170] The tail-suspension and forced-swim assays are two assays for the discovery and validation of novel antidepressants. The knock-out of the noradrenalin transporter, one target of the antidepressant Welbutrin™, demonstrates an increased struggle time in the tail-suspension assay (Xu et al., 2000). The tail-suspension assay used is automated, giving it added objectivity and making it appropriate for high-throughput analysis. Both of these assays measure the efforts of the subject to extricate itself from an inescapable situation, i.e. they measure a tendency toward ‘giving up’. Compounds known to reduce depressive symptoms in patients reduce the immobility time in tail suspension, therefore gene knock-outs that result in decreased time spent being immobile, in the absence of any general increase in activity levels (as measured in assays such as the open field), indicate targets for the discovery of novel therapeutics for the treatment of depression. In this particular set-up (PHM-300 Tail Suspension Test Cubicle) a mouse is suspended by its tail for 6 min, and in response the mouse will struggle to escape from this position. Extended struggle is taken as antidepressive behavior, whereas curtailed struggle is interpreted as depressive.

[0171] 5.4.4.1.7 Circadian Rhythms

[0172] Changes in sleep patterns can be detected by examining activity continuously over a period of days and nights. An infrared beam system is used that monitors the horizontal locomotor activity of individual mice in their home cage environment for 3 days and nights. This facilitates obtaining an accurate indication of their sleep-wake cycle as well as overall locomotor activity rates. Changes in the normal circadian rhythm or an increase or decrease in the periods of activity during the normal sleep cycle indicates genes controlling sleep and indicates therapeutic utility for other conditions, such as depression or schizophrenia, in which normal sleep patterns are disrupted.

[0173] 5.4.4.1.8 Trace Aversive Conditioning

[0174] Cognition, especially the loss of cognitive abilities in dementias such as Alzheimer's disease, later-stage Parkinson's and Huntington's disease, as well as in schizophrenia, is a major focus for drug discovery. This area has been hampered particularly by the lack of rapid assays that specifically target the learning and memory losses associated with these diseases, i.e. learning and memory dependent on areas of the brain such as the hippocampus. Assays generally used, such as the eight-arm radial arm maze or delayed-nonmatching-to-sample procedures require significant time and training. However, animals learn aversive conditioning very easily and this can be combined with ‘trace’ conditioning, in which there is a time interval between the signal stimulus and the aversive stimulus itself, to provide a rapidly (3-5 trials) learned response that is dependent upon the function of the hippocampus. As with most of our other assays, this assay has been automated to increase objectivity and make it appropriate for high throughput behavioral analysis. Gene knock-outs that affect learning and memory in this assay, without changes in basic sensory or motor function, will indicate targets for new treatments for cognitive disorders.

[0175] 5.4.4.2 Level 2 Neurology Tests

[0176] Level 2 neurology tests include, for example, neurochemical analysis of dopamine, norepinephrine, serotonin and their primary metabolites in urine, blood, cerebrospinal fluid (CSF) and brain tissue; levels of melatonin and homocysteine in urine, blood, CSF and brain tissue; in situ hybridization/immunocytochemical analyses using Neo, LacZ or radioactivity, immunohistochemical analyses of markers of choice; pharmacological challenges in vivo; electroretinogram (vision); auditory brainstem response (hearing); detailed neuroanatomical/pathological analysis of brain, spinal cord, eye, ear and peripheral ganglia; field potential and whole-cell patch clamp in brain slices; whole-cell patch clamp of cultured neurons and other cells (HEK, etc.); fluorescence imaging of brain slices and cells; olfactory discrimination test (olfaction and social recognition); trace and delay aversive conditioning; social interaction and social recognition tests; zero maze (anxiety).

[0177] 5.4.5 Oncology

[0178] The targets of oncology therapeutics fall into three major categories: cytotoxic agents such as DNA damaging agents or inhibitors of tubulin or topoisomerase, tissue-specific growth regulators such as estrogen receptor blockers and leutinizing hormone blockers, and disease-specific antitumor agents such as Gleevec™, Herceptin™ and Rituxan™. The oncology Level 1 screen is directed at targets for cancer drugs that fall into the same categories operating through control points in mammalian cell cycle, apoptosis or response to DNA damage.

[0179] 5.4.5.1 Level 1 Tests

[0180] 5.4.5.1.1 Embyronic Lethality and Reduced Viability

[0181] Targets for cytotoxic agents are identified first by embryonic lethality or reduced viability. These phenotypes are examined further to determine effects on cell cycle, apoptosis and angiogensis.

[0182] 5.4.5.1.2 Tissue-Specific Growth Regulation

[0183] Targets affecting growth, differentiation and function of reproductive organs are examined through histopathologic survey of males, virgin females and lactating female mice.

[0184] 5.4.5.1.3 Cell Proliferation

[0185] Oncogene targets that have a direct effect on cell cycle, DNA repair or apoptosis can manifest their function through changes in adult skin fibroblast proliferation. Punch biopsies are taken of skin samples from the backs of mutant mice and cohort controls. These are developed into primary fibroblast cultures and the fibroblast proliferation rates are measured in a controlled protocol. The ability of this assay to detect hyperproliferative and hypoproliferative phenotypes has been demonstrated with p53 and Ku80.

[0186] 5.4.5.2 Level 2 Oncology Tests

[0187] Targets identified from Level 1 are characterized further for their role in mammalian tumorigenesis. Focus is placed on targets that are highly expressed in human tumor cell lines and capable of driving the tumor phenotype as demonstrated by gene knock-down studies or overexpression-driven tumorigenesis models in nude mice.

[0188] 5.4.5.2.1 Quantitative Polymerase Chain Reaction for Analysis of Expression in Cancerous and Normal Cell Lines and Tissues

[0189] Quantitative polymerase chain reaction of candidate genes is done using cDNA prepared from 66 cancer and nine normal cell lines from ATCC, seven primary cell strains from Clonetics, about three cancer lines and matched adjacent normal tissue controls from Ambion, MCF-7 breast cancer cells+/−17b-estradiol and LNCaP prostate cancer cells+/−dihydrotestosterone. This is done to identify targets that are overexpressed in cancerous cell lines relative to normal cell and tissue controls.

[0190] 5.4.5.2.2 Gene Knock-Down Studies with Short Interfering RNA

[0191] Cancer cell lines determined to be overexpressing a target of interest are cotransfected with 3-6 short hairpin RNA vectors and blasticidin resistance vectors or synthetic short interfering RNAs to knock down the expression of specific targets. Assessment is made of the effects of RNA interference on in vitro proliferation, anchorage-dependent and anchorage-independent colony formation and the ability of cell lines to form tumors in nude mice.

[0192] 5.4.5.2.3 Overexpression Studies for Putative Oncogenes

[0193] Oncology targets are tested to determine whether they can drive tumor formation. Full-length genes of interest are cloned into a mammalian expression vector and co-transfected into NIH3T3 and RK3E cells with a blasticidin-resistance vector. The resulting blasticidin-resistant polyclonal pools are tested in vitro for acquisition of anchorage independence, reduced serum dependence and increased focus-forming ability. Stably transfected cell lines expressing exogenous cDNAs of interest are then analyzed for their ability to form tumors in athymic nude mice.

### 5.5 CONCLUSIONS

[0194] Described here is a new conceptual framework for the discovery of drugs using the mammalian genome as a starting point in the analysis. The framework requires genetic antagonism of the drug target combined with a comprehensive in vivo physiological characterization of target function before any chemical screens for pharmaceutical agents are launched. This process constitutes a powerful genetic screen for the targets that allow for maximizing therapeutic effects while minimizing side-effects resulting from therapies modulating the target. In addition, determination of the role of the target in mammalian physiology enables identification of the medical indications for the therapeutics to be developed. Although this may appear an obvious prerequisite, it is important to note that many screens are conducted today against molecular targets for which the medical utility is either completely unknown or hypothesized based on only biochemical, gene expression or lower model organism data.

[0195] The mammalian genetic screen described here is engineered specifically to reveal those genes that encode control points in physiology useful in the treatment of major diseases. The tests described here measure important medical parameters of physiology that are associated with points of therapeutic intervention and medical needs. Additionally, the tests are robust in their application to thousands of animals.

[0196] The screen used to identify therapeutic targets can be applied again to demonstrate the efficacy and potential side-effects of candidate therapeutic agents. This broad phenotypic screen, guided by mammalian genetics, provides a new performance level for the preclinical testing of compounds that are developed to interact with chosen targets. The screen enables identification of the key biomarker indicators of efficacy that should be followed when a compound is at the first-time-in-mammal stage. The genetic tools available for preclinical studies include not only Wild-Type animals but also knock-outs and knock-ins containing the actual human gene targets. The knock-out animals provide guidance for determining the efficacy of novel therapeutic agents. Another powerful aspect of the preclinical testing capabilities includes the treatment of knock-out animals themselves with compounds specific for the target. In such a scenario any effects seen, outside those associated with the knock-out state, are, by definition, off-target side-effects attributable to the compound itself. The ability to manipulate the mouse genome at will provides a powerful tool to define accurately the on-target versus off-target side-effects produced by a given agent. Such new approaches are also very useful in combination with medicinal chemistry strategies to optimize therapeutic agents.

[0197] In the post-genome era, a systematic in vivo screen for targets is a precondition for high-throughput screening of small molecule therapeutics to identify the targets for treatments for disease.

### 5.6 REFERENCES

[0198] Abdelilah, S., et al. (1996) Development 123, 217-227.
[0199] Abe, S., et al. (2000) Br. J. Radiol. 73, 1078-1082.
[0200] Abuin, A., et al. (2002) Trends Biotechnol. 20, 36-42.
[0201] Accili, D., et al. (1996) Nat. Genet. 12, 106-109.
[0202] Air, E. L., et al. (2002) Nat. Med. 8, 179-183.
[0203] Alexander, J. M., et al. (2001) J Bone Miner. Res. 16, 1665-1673.
[0204] Baier, H., et al. (1996) Development 123, 415-425.
[0205] Ballou, L. R., et al. (2000) Proc. Natl. Acad. Sci. USA 97, 10272-10276.
[0206] Boring, L., et al. (1997) J. Clin. Invest. 100, 2552-2561.
[0207] Brand, M., et al. (1996) Development 123, 129-142.
[0208] Brockerhoff, S. E., et al. (1995) Proc. Natl. Acad. Sci. USA 92, 10545-10549.
[0209] Bucay, N., et al. (1998) Genes Dev. 12, 1260-1268.
[0210] Bueno, O. F., et al. (2002) Proc. Natl. Acad. Sci. USA 99, 9398-9403.
[0211] Butler, A. A., et al. (2000) Endocrinology 141, 3518-3521.
[0212] Chalfie, M., et al. (1981) Cell 24, 59-69.
[0213] Chen, J. N., et al. (1996) Development 123, 293-302.
[0214] Clement, S., et al. (2001) Nature 409, 92-97.
[0215] Giros, B., et al. (1996) Nature 379, 606-612.
[0216] Golling, G., et al. (2002) Nat. Genet. 31, 135-140.
[0217] Granato, M., et al. (1996) Development 123, 399-413.
[0218] Haffter, P., et al. (1996) Development 123, 1-36.
[0219] Hawes, N. L., et al. (1999) Mol. Vis. 5, 22.
[0220] Hedgecock, E. M., et al. (1983) Science 220, 1277-1279.
[0221] Hirose, F., et al. (2001) Mol. Cell Biol. 21, 7231-7242.
[0222] Homanics, G. E., et al. (1997) Proc. Natl. Acad. Sci. USA 94, 4143-4148.
[0223] Hopkins, A. L. and Groom, C. R. (2002) Nat. Rev. Drug Discov. 1, 727-730.
[0224] Horvitz, H. R. and Sulston, J. E. (1980) Genetics 96, 435-454.
[0225] Ito, M., et al. (1995) Proc. Natl. Acad. Sci. USA 92, 3521-3525.
[0226] Joshi, R. L., et al. (1996) EMBO J. 15, 1542-1547.
[0227] Kawabe, T., et al. (1994) Immunity 1, 167-178.
[0228] Kelsh, R. N., et al. (1996) Development 123, 369-389.
[0229] Klaman, L. D., et al. (2000) Mol. Cell Biol. 20, 5479-5489.
[0230] Krege, J. H., et al. (1995) Hypertension 25, 1111-1115.
[0231] LaJeunesse, D. R., et al. (2001) Genetics 158, 667-679.
[0232] Leighton, P. A., et al. (2001) Nature 410, 174-179.
[0233] Lieschke, G. J., et al. (1994) Blood 84, 1737-1746.
[0234] Malicki, J., et al. (1996a) Development 123, 263-273.
[0235] Malicki, J., et al. (1996b) Development 123, 275-283.
[0236] Marsh, D. J., et al. (2002) Proc. Natl. Acad. Sci. USA 99, 3240-3245.
[0237] Mitchell, K. J., et al. (2001) Nat. Genet. 28, 241-249.
[0238] Mizuno, A., et al. (1998) Biochem. Biophys. Res. Commun. 247, 610-615.
[0239] Mukherjee, R., et al. (1997) Nature 386, 407-410.
[0240] Mullins, M. C., et al. (1994) Curr. Biol. 4, 189-202.
[0241] Nagy, T. R. and Clair, A. L. (2000) Obes. Res. 8, 392-398.
[0242] Neuhauss, S. C., et al. (1996) Development 123, 357-367.
[0243] Nusslein-Volhard, C. and Wieschaus, E. (1980) Nature 287, 795-801.
[0244] Odenthal, J., et al. (1996) Development 123, 103-115.
[0245] Oliver, P. M., et al. (1998) Proc. Natl. Acad. Sci. USA 95, 2547-2551.
[0246] Pasparakis, M., et al. (1996) J. Exp. Med. 184, 1397-1411.
[0247] Piotrowski, T., et al. (1996) Development 123, 345-356.
[0248] Puignero, V., et al. (1995) Int. Arch. Allergy Immunol. 108, 142-147.
[0249] Punyanitya, M., et al. (2000) FASEB J. 14, 497.
[0250] Rogers, D., et al. (2001) Neurosci. Lett. 306, 89-92.
[0251] Saftig, P., et al. (1998) Proc. Natl. Acad. Sci. USA 95, 13453-13458.
[0252] Scarff, K. L., et al. (1999) Gastroenterology 117, 605-618.
[0253] Schier, A. F., et al. (1996) Development 123, 165-178.
[0254] Schreiber, S. L., et al. (2002) Genesis 33, 141-152.
[0255] Shahinian, A., et al. (1993) Science 261, 609-612.
[0256] Solnica-Krezel, L., et al. (1996) Development 123, 67-80.
[0257] Sora, I., et al. (1997) Proc. Natl. Acad. Sci. USA 94, 1544-1549.
[0258] Spicer, Z., et al. (2000) J. Biol. Chem. 275, 21555-21565.
[0259] Stemple, D. L., et al. (1996) Development 123, 117-128.
[0260] Sugiyama, F., et al. (2001) Genomics 71, 70-77.
[0261] Sullivan, K. M. and Rubin, G. M. (2002) Genetics 161, 183-193.
[0262] Therrien, M., et al. (2000) Genetics 156, 1231-1242.
[0263] Walke, D. W., et al. (2001) Curr. Opin. Biotechnol. 12, 626-631.
[0264] Wiles, M. V., et al. (2000) Nat. Genet. 24, 13-14.
[0265] Xu, F., et al. (2000) Nat. Neurosci. 3, 465-471.
[0266] Zambrowicz, B. P. and Sands, A. T. (2003) Nat. Rev. Drug Discov. 2, 38-51.
[0267] Zambrowicz, B. P., et al. (1998) Nature 392, 608-611.
[0268] Zhang, B. W., et al. (1996) J. Exp. Med. 183, 413-420. 278.

### Example 6

### A Mouse Library with 17 Distinct Mouse Mutants

[0269] A mouse library of 17 distinct mouse mutants or mouse lines was generated. The following table (Table 1) describes the vector used to generate each line. Each vector is a gene trap vector that may integrate into a gene in the mouse genome and result in a gene transcript comprising vector sequences and exon sequences from the gene. The polynucleotide sequences referenced in Table 1, and disclosed in the appended Sequence Listing, were obtained by sequencing transcripts that include sequences of the gene trap vector. Table 1 also provides phenotypic data of each mouse line.

TABLE 1

| Line | | SEQ | |
|---|---|---|---|
| No. | Vector: | ID: | Phenotype: |
| 1. | VICTR24 | 9 | Mutation of the gene encoding coagulation factor II (thrombin) |
| | | | receptor (F2R) resulted in reduced viability in (−/−) animals. |
| | | | Surviving (−/−) mice exhibited a decreased depressive-like |
| | | | response, decreased B cell counts, and increased CD4 counts. |
| | | | Transcript was absent by RT-PCR. |
| 2. | VICTR48 | 10 | Mutation of the gene encoding platelet/endothelial cell adhesion |
| | | | molecule (PECAM) resulted in increased artery-to-vein ratios in |
| | | | (−/−) animals. Transcript was absent by Northern blot. |
| 3. | VICTR62 | 11 | Mutation of the gene encoding the ortholog of human cyclin- |
| | | | dependent kinase 2 (CDK2) resulted in infertile female (−/−) mice |
| | | | exhibiting ovarian hypoplasia. Male (−/−) mice exhibited |
| | | | hypogonadism, an increased anxiety-related response, and growth |
| | | | retardation. Transcript was absent by RT-PCR. |
| 4. | VICTR48 | 12 | Mutation of the gene encoding the ortholog of human UDP- |
| | | | GlcNAc:betaGal beta-1,3-N-acetylglucosaminyltransferase 1 |
| | | | (B3GNT1) resulted in slight growth retardation in male (−/−) mice. |
| | | | The (−/−) mice also exhibited an increased percentage of natural |
| | | | killer cells and an increased blood urea nitrogen level. Transcript |
| | | | was absent by RT-PCR. |
| 5. | VICTR21 | 13 | Mutation of the gene encoding the ortholog of human |
| | | | apolipoprotein D (APOD) resulted in a decreased depressive-like |
| | | | response in (−/−) mice. Male (−/−) mice also exhibited a decreased |
| | | | serum insulin level. Transcript was absent by RT-PCR. |
| 6. | VICTR23 | 14 | Mutation of the gene encoding the ortholog of human transient |
| | | | receptor potential cation channel, subfamily V, member 2 |
| | | | (TRPV2) resulted in a decreased percentage of CDS cells and an |
| | | | increased percentage of B cells in the peripheral blood of (−/−) |
| | | | mice. Transcript was absent by RT-PCR. |
| 7. | VICTR22 | 15 | Mutation of the gene encoding a hypothetical mouse protein |
| | | | (LOC76974) resulted in compensated hemolytic anemia in (−/−) |
| | | | mice. The (−/−) mice also exhibited decreased serum glucose and |
| | | | HgbA1c levels. Transcript was absent by RT-PCR. |
| 8. | VICTR48 | 16 | Mutation of the gene encoding the ortholog of human |
| | | | apolipoprotein B editing complex 2 (APOBEC2) resulted in |
| | | | decreased bone mineral content and density in (−/−) mice. The (−/−) |
| | | | mice also exhibited slight growth retardation. Transcript was |
| | | | absent by RT-PCR. |
| 9. | VICTR27 | 17 | Mutation of the gene encoding the ortholog of human solute |
| | | | carrier family 29 (nucleoside transporters), member 1 (SLC29A1) |
| | | | resulted in a decreased red blood cell count in (−/−) mice. The |
| | | | mean corpuscular volume and mean corpuscular hemoglobin were |
| | | | also increased in (−/−) mice. Transcript was absent by RT-PCR. |
| 10. | VICTR24 | 18 | Mutation of the gene encoding the ortholog of human interleukin-1 |
| | | | receptor-associated kinase M (IRAK-M) resulted in an increased |
| | | | percentage of NK cells in (−/−) mice. Transcript was absent by RT- |
| | | | PCR. |
| 11. | VICTR37 | 19 | Mutation of the mouse gene encoding neurotrophin receptor |
| | | | associated death domain (Nradd) resulted in increased serum IgG1 |
| | | | and IgG2a responses to ovalbumin challenge in (−/−) mice. Male |
| | | | (−/−) mice also exhibited a decreased pain response. Transcript was |
| | | | absent by RT-PCR. |
| 12. | VICTR30 | 20 | Mutation of the gene encoding the ortholog of a human |
| | | | hypothetical protein (MGC11324) resulted in enhanced |
| | | | learning/memory in male (−/−) mice. Transcript was absent by RT- |
| | | | PCR |
| 13. | VICTR48 | 21 | Mutation of the gene encoding the ortholog of human mitogen |
| | | | activated protein kinase kinase kinase 2 (MAP3K2) resulted in |
| | | | small male (−/−) mice, exhibiting a decreased fasting serum glucose |
| | | | level. Transcript was absent by RT-PCR. |
| 14. | VICTR24 | 22 | Mutation of the gene encoding the ortholog of human solute |
| | | | carrier family 26, member 9 (SLC26A9) resulted in impaired |
| | | | sensorimotor gating/attention in (−/−) mice. Hematological |
| | | | abnormalities were also noted in these mutants. Increased |
| | | | triglyceride and cholesterol levels and decreased bone mineral |
| | | | density and bone mineral content were noted in female (−/−) mice. |
| | | | Transcript was absent by RT-PCR. |
| 15. | VICTR24 | 23 | Mutation of the gene encoding the ortholog of human glycoprotein |
| | | | A33 (GPA33) resulted in immunological abnormalities in (−/−) |
| | | | mice. Transcript was absent by RT-PCR. |
| 16. | VICTR41 | 24 | Mutation of the gene encoding the serine protease inhibitor |
| | | | SERPINA3-like protein resulted in a decreased pain response in |
| | | | (−/−) mice. Thymus-specific transcript was absent by RT-PCR. |
| 17. | VICTR48 | 25 | Mutation of the gene encoding a novel trypsin inhibitor-like |
| | | | protein resulted in slightly increased serum glucose levels in (+/−) |
| | | | and (−/−) animals. Transcript was absent by RT-PCR. |

[0270] The polynucleotide sequences referenced in Table 1 were used to search the Genbank database to identify mouse polynucleotide sequences by accession numbers (Mouse Nucleotide Accession Nos.) that represent the full length transcript corresponding to the gene carrying the engineered mutation in each mouse line of Table 1. Also obtained were the corresponding polypeptide sequences by accession numbers (Mouse Protein Accession Nos.). Also obtained were the human polynucleotide (Human Nucleotide Accession Nos.) and polypeptide sequences (Human Protein Accession Nos.) that correspond to the mouse sequences. The Genbank accession numbers for all four types of sequences are shown below in Table 2 for each of the 17 mouse lines.

TABLE 2

| Line | Mouse Nucleotide | Mouse Protein | Human Nucleotide | Human Protein |
|---|---|---|---|---|
| No. | Accession Nos.: | Accession Nos.: | Accession Nos.: | Accession Nos.: |
| 1. | NM_010169 | NP_034299 | HUMTHRR | AAH02464 |
| 2. | NM_008816 | NP_032842 | NM_000442 | NP_000433 |
| 3. | NM_016756 | Q3U6X7 | NM_001798 | P24941 |
| 4. | NM_016888 | NP_058584 | BC030579 | NP_006568 |
| 5. | NM_007470 | P51910 | NM_001647 | P05090 |
| 6. | NM_011706 | NP_035836 | NM_016113 | NP_057197 |
| 7. | XM_133915 | Q9CRB3 | N/A | N/A |
| 8. | NM_009694 | Q9WV35 | NM_006789 | Q9Y235 |
| 9. | NM_009694 | Q9WV35 | NM_006789 | Q9Y235 |
| 10. | NM_028679 | Q8C7U8 | NM_007199 | Q9Y616 |
| 11. | NM_026012 | Q8CJ26 | ENST00000340771 | ENSP00000339604 |
| 12. | NM_172715 | Q8CON2 | NM_032717 | Q96NA3 |
| 13. | NM_011946 | Q61083 | BC065755 | Q9Y2U5 |
| 14. | NM_177243 | IPI00124383 | NM_052934 | NP_599152 |
| 15. | NM_021610 | NP_067623 | NM_005814 | NP_005805 |
| 16. | XM_194860 | XP_194860 | N/A | N/A |
| 17. | ENSMUST00000046447 | ENSMUSP00000043098 | NM_178491 | Q9H3Y0 |

### Example 7

### Mice According to Line No. 6

[0271] As discussed in Table 1, supra, mice of line number 6 comprise a disruption in a gene comprising SEQ ID NO:14. The disrupted gene encodes an ortholog of human transient receptor potential cation channel, subfamily V, member 2 (TRPV2) and the disruption resulted in a decreased percentage of CD8 cells and an increased percentage of B cells in the peripheral blood of (−/−) mice. Transcript was absent by RT-PCR.

### 7.1 TRPV2 mRNA EXPRESSION IN WILD-TYPE MICE

[0272] RT-PCR analysis of mRNA extracted from 26 tissues of wild type mice indicated that TRPV2 was expressed in brain, spinal cord, eye, thymus, spleen, lung, kidney, liver, stomach/small intestine/colon, asthmatic lung, blood, aortic tree and mammary gland (MG) from 5 week old virgin female mouse; and was not expressed in skeletal muscle, bone, heart, adipose, LPS liver, banded heart, skin fibroblast, prostate and MG of mature virgin, 12 DPC, 3 day post-partum (lactating), 3 day post-weaning (early involution) and 7 day post weaning (late involution).

### 7.2 TRPV2 GENE DISRUPTED MICE

[0273] Embryonic stem cells (Lex-1 cells derived from murine strain A129) were mutated using gene trapping to disrupt normal TRPV2 expression. The mutated embryonic stem cells were then microinjected into blastocysts, which were subsequently introduced into pseudopregnant female hosts and carried to term using established methods, such as those described in, for example, Zambrowicz et al., eds., “Mouse Mutagenesis”, 1998, Lexicon Press, The Woodlands, Tex., and periodic updates thereof, herein incorporated by reference. The resulting chimeric animals were subsequently bred to produce offspring capable of germline transmission of an allele containing the engineered mutation in the TRPV2 gene. The chimeric knockout mice were bred to C57B16/J albino mice to generate F1 heterozygotes. F1 heterozygotes were intercrossed to generate F2 wild-type (+/+), heterozygote (+/−), and homozygote (−/−) mutant progeny. The following studies were performed on mice of the F2 generation.

### 7.3 TRPV2 DISRUPTION

[0274] Mice homozygous (−/−) for the disruption of the TRPV2 gene were studied in conjunction with mice heterozygous (+/−) for the disruption of the TRPV2 gene and wild-type (+/+) litter mates. During this analysis, the mice, a cohort of 4 (+/+), 4 (+/−) and 8 (−/−), were subjected to a medical work-up using an integrated suite of medical diagnostic procedures designed to assess the function of the major mammalian organ systems in the subject, defined previously as the Level 1 analysis. By studying numerous mice in which the TRPV2 gene had been disrupted, in conjunction with wild-type litter mates, more reliable and repeatable data were obtained.

### 7.4 EFFECTS OF TRPV2 DISRUPTION ON MUTANT MICE

[0275] Studies of homozygous (−/−) and heterozygous (+/−) TRPV2 mice, along with wild-type cohorts indicated that the general health of the TRPV2 homozygote (−/−) mice was not different from wild type (+/+) mice in Level 1 areas of Blood Chemistry, Cardiology, Diagnostics, Endocrinology/Metabolism, Neurology, Oncology, Opthalmology and Pathology. Differences were noted in Immunology for the FACS assay (described in section 5.4.3.1.3) whereby the (−/−) mice exhibited a decreased mean percentage of CD8 cells and an increased mean percentage of B cells when compared with their (+/+) littermates and the historical mean. There were no significant differences in other Immunology assays: ovalbumin challenge (described in section 5.4.3.1.4) and acute phase response assay (described in section 5.4.3.2).

### 7.5 DISCUSSION

[0276] The vanilloid receptor family of cation channels includes the capsaicin-sensitive, proton- and heat-activated TRPV1 and noxious heat-activated TRPV2. TRPV1 and TRPV2 are present in human peripheral lymphocytes. (Saunders et al. Mol Immunol (2007) 44(6):1429-35; Schwarz et al. Handb Exp Pharmacol (2007) 179:445-56) The level of TRPV2 mRNA in heart tissue of three mouse strains was studied (Kunert-Keil et al. BMC Genomics (2006) 7:159). Certain cannabinoids specifically activate TRPV2 channel activity (US Patent Application No. 20070105086).

### 7.6 THERAPEUTIC APPLICATIONS

[0277] The ability to specifically regulate T cell activation and function provides particularly useful therapeutic applications of the present invention. For example, via specific and selective inhibition of a TRPV2 molecule (e.g., TRPV2) which results in inhibition of T cell maturation, activation and function, the T cell-modulating compounds of the present invention can lead to profound immunosuppression. TRPV2 specifically accumulates only in the brain and in T cells or lymphoid tissues containing high numbers of T cells. Therefore, selective TRPV2 inhibitors could prove highly tissue and even cell type specific. This will reduce the likelihood of adverse side reactions and general toxicity. As a result, therapeutic compositions comprising selective TRPV2-inhibitors of the present invention are advantageous over currently used immunosuppression drugs such as cyclosporine. The latter has severe side effects due to its pleiotrophic action. (PCT/US2005/044386).

### Example 8

### Polynucleotides Sequences Obtained From Hybrid Transcripts

[0278] Gene trap vectors of the current invention were introduced into ES cells. A selection protocol was employed to identify cells with a copy of a gene trap vector integrated into their genome. Hybrid transcripts were identified and isolated from the cells following selection for sequencing of non-vector sequences included in those hybrid transcripts, i.e., sequences from the mouse genome and trapped in the hybrid transcript (trapped sequences). These assays were carried our as discussed herein and in United States Patent Application Number 20050059060, which is incorporated herein for that and any other purpose. Each trapped sequence obtained is believed to represents at least a part of a gene or an entire gene that is expressed in ES cells and/or other cell types. Thus, each trapped sequence is believed to be a sequence tag or sequence identifier to identify a gene in a mouse, or another species that is sufficiently closely related to mouse. Trapped sequences are shown in SEQ ID NOS. 26 to 3679.

[0279] The present invention is not to be limited in scope by the specific embodiments described herein, which are intended as single illustrations of individual aspects of the invention, and functionally equivalent methods and components are within the scope of the invention. Indeed, various modifications of the invention, in addition to those shown and described herein, will become apparent to those skilled in the art from the foregoing description. Such modifications are intended to fall within the scope of the appended claims. All cited publications, patents, and patent applications are herein incorporated by reference in their entirety for any purpose.

The application's sequence listing, which the Patent Office published only in electronic form, follows.

SEQUENCE LISTING (3679 sequences)

SEQ ID NO: 1 - DNA, 52 bp, Homo sapiens
ccagtgagcagagtgacgaggactcgagctcaagcttttttttttttttttt

SEQ ID NO: 2 - DNA, 23 bp, Homo sapiens
aagcccggtgcctgactagctag

SEQ ID NO: 3 - DNA, 22 bp, Homo sapiens
gaatatgtctccaggtccagag

SEQ ID NO: 4 - DNA, 23 bp, Homo sapiens
ccagtgagcagagtgacgaggac

SEQ ID NO: 5 - DNA, 18 bp, Homo sapiens
ctagctagggagctcgtc

SEQ ID NO: 6 - DNA, 23 bp, Homo sapiens
ccagagtcttcagagatcaagtc

SEQ ID NO: 7 - DNA, 18 bp, Homo sapiens
gaggactcgagctcaagc

SEQ ID NO: 8 - DNA, 20 bp, Homo sapiens
ctgtaaaacgacggccagtc

SEQ ID NO: 9 - DNA, 176 bp, Homo sapiens
  misc_feature (1)...(176): n = A,T,C or G
gaccgagaggacagttgctacggtgancccccgctcattctttctaaggaatcccattagttnntgcaaagaactgnattnacttcgaaacctaaaaaacaaccaatatccgatatgcacgaatacttctgctatcaagagtctagattggataattaccagcaaggtgacgggaa

SEQ ID NO: 10 - DNA, 582 bp, Homo sapiens
  misc_feature (1)...(582): n = A,T,C or G
agctgtttcccaagccgaagttagagttctcctccagtcgtctggaccaaggggagttgttggacctgncctgctccgactcgggcacacctgtagccaacttcaccatccagaaggaagagacggtcttgtcgcagtatcagaatttcagcaagatcgccgaggagagtgacagcggggagtacagctgtactgcaggcatcggcaaagtggtcaagagaagcggcctggtaccgatccaggtgtgcgaaatgctctcgaagcccagtatttttcatgatgccaagtctgagatcataaaaggacatgccataggcatcagctgccagtccgaaaatggaactgcacccatcacttaccaccttatgaaagcaaagagtgacttccagactctcgaggtgacctccaatgacccagcaacattcacagataagcccaccagagacatggaataccagtgcagagcggataattgccatggctccggtaggtccagagttcaaatcccancaaccacatggtggctcacaaccatccgtaacnagatctgactccctcntctgggagtggcctgaagacagc

SEQ ID NO: 11 - DNA, 337 bp, Homo sapiens
  misc_feature (1)...(337): n = A,T,C or G
acaatctctctccttaaggaacttaatcaccctaatatcggggggctgctggatgtcatccacacagaaaataagctttatctggtttttgaatttctgcaccaggacctcaagaaattcatggatgcctctgctctcacgggcattcctcttcccctcatcaagggctgacaagatagctcagcaggtaaaagagcctggctncaagcctgatgacctgatggcctgaactccacccccaggttccacacaagaagaacacggnacttctgcaaattgncctctgacttccacacatgcactgtggcatgcccctgcccgctctaaatacaagaaa

SEQ ID NO: 12 - DNA, 183 bp, Homo sapiens
  misc_feature (1)...(183): n = A,T,C or G
actgaggtatgaactgctagagaaataaagttctgccaaaatattgcatatactagtatcttgtaacatgctttcttgaaagattttggngctttanagggtnctcacctgtgctacaggggactgggaaaaagtggaaataaagtgattgtattttttaatcatcaccgtataaaaaaaaaa

SEQ ID NO: 13 - DNA, 143 bp, Homo sapiens
  misc_feature (1)...(143): n = A,T,C or G
attcaagccaactactcgctgatggagaacggaaacancgaagtgctaancanggagctgagtcctgatggaaccatgaaccaagtaaagggtgaagccaaacagagcaacgtctcagagccagccaagctggaagtccaggt

SEQ ID NO: 14 - DNA, 207 bp, Homo sapiens
aaaggttataaaaagaacccaacctctaaacctgggaagaacagtgcctcagaggaagaccatctgcctcttcaggtcctccagtcccactgacggtccagatgcggcagcagcaggctggcagggtagagtagggaattttgccagccacacccgaggctactgaattttggtggaaatataaatattttttgcataaaaaaaaaa

SEQ ID NO: 15 - DNA, 211 bp, Homo sapiens
  misc_feature (1)...(211): n = A,T,C or G
acctaccgggggagtnaaagagatgnggnacctgangaaagccatctatctgcctgtttctttcccagacttagccacccacacaaatcatgggctttgttctcatcaaaggacatgaagttgctgcttgctgaagatattctagctgccctggagtttcataatgggaagctgtgacttgggtgtcaataaagagagtttcaacacctgc

SEQ ID NO: 16 - DNA, 357 bp, Homo sapiens
  misc_feature (1)...(357): n = A,T,C or G
ggttttacctgctgccactcagagcaatgacccggatgccatccaggacatacctggcttcctgattctacttggagttggacatctgacactaaccagttgcactggacaagaccctctctcagagaactcaaaacatacctcgggacgtcattcattcattcaatcatgccttctgtaatacggctatcagaagaaggaaaatgaagacaagaaaaacaactgtgatgtgggcagcaggtacctgggggtggagggtcttattgcctctccaggggtgctgcctgagacaaagatcctcagtcaaggtacagacctttgaaatacagctagaaaagtgttctgaattgggctgnc

SEQ ID NO: 17 - DNA, 261 bp, Homo sapiens
  misc_feature (1)...(261): n = A,T,C or G
ctgctcacttccttccctgccagggacgagcaggggtcgagaggggctgntcttctagctgacttctgntttcctctggactgtgcttcgcccagctgtccaggagccancgatggcctgcgggtggacttggaattnagggtcagaatggcnagggctcaaatggcctctgactgacagcttccnactgatgcccgnttacttccaagcncaaagaaaaatccagggnccaanagaggatctngtccgccctggcctatt

SEQ ID NO: 18 - DNA, 411 bp, Homo sapiens
  misc_feature (1)...(411): n = A,T,C or G
attcttactaacggattttgctgcagcgcacttccgacccaatctagagcatgcagagttctaccataaatatgaccggcggtggcaggaaacatctgtggtacatgccagaagaatacatcagacagggaagactttccgttaaaactgatgtctacagcttcggaatcgtgatcatggaggttctaacgggctgcaaagtggtgctggatgacccgaaacacgttcagctgcgggacctcctcatggaactgatggagaaaagaggcctagactcctgcctgtccttcttagacaggaagataccaccctgtcctcggaacttctctgcaaagctcttctctctggcgggcccggtgtggtggcaaccaangccaagtttaagacccacgaatggaccgaaaggtcctt

SEQ ID NO: 19 - DNA, 510 bp, Homo sapiens
  misc_feature (1)...(510): n = A,T,C or G
agactgagagttcctccttctgagattcatgataagcaggctncaagctccgncaactcagttctctacacaactccccttcaccaaaaaacagcccagcaggcagcgcctggcagcaccatgctttataacgtcagcaaaggtgtggtctattcagatacagccctgcaggggcaggacggggacagggaaggaatgtgggtaggagctgggggagccctagcccccaatacctcctccctatttccccctgagcctccaggggcctcgagcaacatcattcctgtctactgtgctctcctagctacagtgatccttggtctgctggcctatgtggccttcaaatgctggcgctcacataagcaaaggcaacaagttggctaaagctcggactgtaaagctaggggaccctgacagggacccaaaagnggnggggaacngnaacgtnttcggggactctcctcctaatctgganccctgtnttcccagccagggaccacacccggacct

SEQ ID NO: 20 - DNA, 466 bp, Homo sapiens
  misc_feature (1)...(466): n = A,T,C or G
cttctgagacccggatgccggnngggcgctgtgttttccgaactgcggctggactgcctgggactctgacacctacggctctcggctttcctggggacctcttcctgagggcgtgccgagacatggagggcgcanacctggcagagaagctcctgtccacctggctgacgctggtgggcggcctcatccttttaccctcggccttcggattatccctgggtatctcggagatctacatgaagatcctggtgaaaaccttggagngggccacattacgaattcagaaaggagccctcaaggagtcacctcttaaaaactcagcttctgngggtattatccaaagaagatgaagncacccatgggagaaagggctctctggtccttcgaggaaggggacttccgagctctctgatgtggttctattttctccaaanaagggggttggaanccatttggagggagggat

SEQ ID NO: 21 - DNA, 403 bp, Homo sapiens
  misc_feature (1)...(403): n = A,T,C or G
atgatcagcaagctttgaattcaatcatgcaagatttggctgtccttcataaggccagtcggccagcattatctttacaagaaaccaggaaagcaaaaccttcatcaccaaaaaaacagaatgatgttcgagtcaaatttgaacatagaggagaaaaaaggatcctgcaggttactagaccagttaaactagaagacctgagatctaagtncannatcgcctttgggcagtctatggatctacactataccaacaatgagttggtaattccgttaactacccaagatgacttggacaaagctgtggaactgctggatcgcagtattcacatgaagaggcttcagatattacttgtagtaaatgggagtacacaggctactaatttagaaccatcaccgtcacc

SEQ ID NO: 22 - DNA, 390 bp, Homo sapiens
  misc_feature (1)...(390): n = A,T,C or G
gtgtgcttgtcaatgtcccagacatgaaccagcccaggccccgctacgtggtagacaagagctgcgtactccctctccctcttcgatgatgagtttgagaagaaggaccgtgcctacccggtgggagagaagcttcgcaacactttcaggtgctcctcagccaagttcaaagcctttgtgtttgggctgttgcctgtgctctcctggctccctaaatacaagatcaaagactacatcatacncnannagntgnnnnnactnagtggggggtgtatccaggtgccacaaggcatggcatttgcattgctggccaaccttcctgctgtcaacggtctctactcctccttcttccccctcctgacctatttcttcttacggggtatggcagct

SEQ ID NO: 23 - DNA, 456 bp, Homo sapiens
  misc_feature (1)...(456): n = A,T,C or G
cactgaggaaagagtggtcacctggaattttgtgacaaagaaatacatctatgggaaccgttatgagaatcgagtgagagtatctaacgatgctgagttgtcaaatgcctctatcaccatcgaccagctgaccatggacgacaatggcacctacgagtgctccgtgtcactgatgtcggaccaggatgtcaacgccaagtctcgagtccgcctcttggtccttgaggatttcaaacaaatggcaagaatcggtgtaaatctgaaacctgattctgctggtcctccaaccaaactccggcccgtacatcaaggaccacctacttttaaagacaatcagattaacccgaagagttaaggctacacgtttaatatganaagtatnggaattcgttgaaactaacctcttgctttaaaaaaaattacatgttaataaacccagcaatattctttgtgggg

SEQ ID NO: 24 - DNA, 409 bp, Homo sapiens
  misc_feature (1)...(409): n = A,T,C or G
acactgagttgcccagaaacgtctactcatcggattgctactacncngaaatcctcaaagcaagaataaaatatgatcccggagggatagatttaggctctactcagttttcgtcccatcagaaagcctttttgagctaaggagaagagagttatggctggtgtctcccctgctgtccttggatgcccagangtcaccttggaaaggaacacggcantccatgaagtccaagaaaatatnacatttaggggacagtttaacactggcctccagcaacactgacttttgccttcagcctcttacaggaaacctggttttnaanaatccagatgaaaatgttgncttctccccattcagcatctttcactgccttggcccctccttgntcccttggggagcaaaagagcca

SEQ ID NO: 25 - DNA, 425 bp, Homo sapiens
  misc_feature (1)...(425): n = A,T,C or G
gggatgagcagctggccaggtctgctgaagcctgggccacccagtgcatctggacccatggaccctcacagctgatgaagtacgtgggccagaacctctctatccattccggccggttccgttctgtggtagaccttgtgaggtcttggtctgaggagaagcgccattactcattcccggctccaaaggattgcaccccacactgcccttggctctgcagtggtcctgtctgctcccactatacccagatggtgtgggcatcctccagtcggctgggctgtgccattaacacctgtagcagcatcaatgtgtggggcaacacctggcagcaggctgtctacctggtctgcaactacgccattaagggcanctggatcggagaggcaccctacaaggccgggaagccatgttctgcctgtcttcca

SEQ ID NO: 26 - DNA, 158 bp, Homo sapiens
acttatggatcttcactgcaagatggactgttccaatctcagaggaactcttccagaaacctgtatagactactttggccttgaactcctacaggtgggcctgcctttgcttcctagtgctgggattaaaggtgtgtatcaccactgaaaaaaaaaaa

SEQ ID NO: 27 - DNA, 153 bp, Homo sapiens
  misc_feature (1)...(153): n = A,T,C or G
gactgagggaaagtcatggaggcttcaggcntcttcttcccagtctcaagacagtggtggagtccacagggaaacggaagatcactncgccgaccatgngganctggccttnctangaggacgagcttcagctnttgaggagcgtgctgctgt

SEQ ID NO: 28 - DNA, 361 bp, Homo sapiens
  misc_feature (1)...(361): n = A,T,C or G
aacatcgatcatgtcatttcctcgcttggaacgaattcagcctctcatancgggcaacagcaccaaggcctgaaaggaaggcttgctgggtgccaggaagcaggacattgcattaaaaagcaggtctggttcagcactaatccctacctacttctgcttggtcccgccagctcgctaccatggattcctgagatctttttgttccggctcacttccttcctctggccatcaacctaaggaggtcctgtttgcaagccattgtccatgacattgctttttgtttgggtttttgattgntgagtctggtcttgaacttgngatcttcctgcctcttcaatgnnaagngaaccaccatccctga

SEQ ID NO: 29 - DNA, 239 bp, Homo sapiens
  misc_feature (1)...(239): n = A,T,C or G
taggacccagaagatgtgtgtgcgagattgtgtcttctanaaatgatggggacgcttcacccatgttacccaaacagtatggttgtctaaacaagacccgaacatgancatcaccaacagacatgccaatatggaaaggaaatcccctggagtccctaagaactacagtcggcctcggaattgttgggagtggggaggagtcttntgtctcacccangnatgaccctgctaccgcctat

SEQ ID NO: 30 - DNA, 210 bp, Homo sapiens
  misc_feature (1)...(210): n = A,T,C or G
gagacatgctgatgctgggacaaagaatggtgctgncatgagctttcagagtactctgacnacggtgactgggaagctgttttggacatnnggncctntncccacccttgnttgcctatnttccagattggatnanctgccttccttcaagcttttaaacctngnncggnagagaacatgaagactggaaacnacctttaaaaacttaat

SEQ ID NO: 31 - DNA, 264 bp, Homo sapiens
  misc_feature (1)...(264): n = A,T,C or G
gactgaggtggggtctttcaggaggagaggaagncgacgacgacgacgctagttactgcacggaaagcagcttcaggagccatagtacatacagcagcactccanntaannacccaaagnnnangggnganngnttccncacctnctccctccccctggcttgctccctctccagtgcagtgcatcctgcttcctagctccccccccccttcccggcctgtcccccacgcggaggccacggcgcgtntagtgacaaaaaaaaaa

SEQ ID NO: 32 - DNA, 355 bp, Homo sapiens
  misc_feature (1)...(355): n = A,T,C or G
gaactgagatctccagtccaggatttcccctggtccacgaatcttgttggaatgccttcggagcatcactgatccaggagctgaccttctgtcatttacatggcgtctccttgatgaaatattctccagctgcttaagaacatagtgaacagtttctcacggattccaacttgaacaaaaatcacacctccatccttgttcaacagacccccaaagcatctacttttccaagtacacacactcaggaggcagagccaagtggaccttttgagttcaagcccaacgtggtctacanaagcaaagtttcaggacagccagggcttcataaatagatcttgtctcaaataaaaaagaa

SEQ ID NO: 33 - DNA, 188 bp, Homo sapiens
  misc_feature (1)...(188): n = A,T,C or G
actgagtatgtgtgtgccggnagagttcaaagcagggcttcggcatcccctggacattatcaatagtgggcaaggacctcaggtttctggagagaacagcaagagctcttaatggcccagccaactcccaagtctcttcagttatattttttccaagaattacntaaaagaggctattaaaaaaaaaa

SEQ ID NO: 34 - DNA, 436 bp, Homo sapiens
  misc_feature (1)...(436): n = A,T,C or G
aatgaaggaccctganactnctcngaagaagggattgatgcnggncgcttttggaatgatacagaacnnnctacaaccagaaacactagnaaaggccactgaaaangctaacgcctaaacccgggtntnaangcnntccgcacnccggcccagnntacggnaccgnctttcagccaggcctgngganagcaagagtgaaaaaatgcggaggggagttccaagccgccttttcccaactnaagggccccggactttgnttgnccgttgctgaaaganccctatagacaaagatgagaagacnttnttngaattgatcagagacaaaaaagggctcgaannaaangagttttgancggnacaccgtaccatttaaatgtgtctgctctttctggnntnaatcaaanaaagggatccctntggaaatacgaatattcgg

SEQ ID NO: 35 - DNA, 306 bp, Homo sapiens
  misc_feature (1)...(306): n = A,T,C or G
gactgaggtggccctctagctgcactggccctccacanctatggcctcctgcccagactcagataatagctgggtgctcgctggttctgagaatctgcctgtggagactctgggcccagaacccaggatggacccagaatctgagggagcctcccaggcccttcgggactcctccaaggcagatggcaaagaattagcttgggaccttggatggagaagagaagcttttccagacggaaagttcccagagagaaactgctgttctgacagagtctgcggccaagggcactctgggagccgatggtc

SEQ ID NO: 36 - DNA, 205 bp, Homo sapiens
  misc_feature (1)...(205): n = A,T,C or G
gctgcccgtccctccagatactctgctgggctcctgangggctncttgaattgacccttangtgtnngcttgnggagcccaatgtntntaaaagaaggcatgttctgatccaaagtgttatcgtcaagtgtgctaatttaaccagactgactcacagatggcttctttaataaataaacccttttcctatttttaaaaaaaaaaa

SEQ ID NO: 37 - DNA, 267 bp, Homo sapiens
  misc_feature (1)...(267): n = A,T,C or G
cagctcacgatgccagganctgaccaatnactactttggnttcagtggatggtcgaaaaggatcatcaagctgcaggagctctccgnactggangatgcagctctcagctgtgcccatgcanaaggggagcccccagatnctntgcgctgtanaggaggtgctgcccccctacggatgcagnagccctggggttggcatctctgaggagcctntgcaccagctggaggaagggaagagctggntaattatgaacaggaagacagctc

SEQ ID NO: 38 - DNA, 282 bp, Homo sapiens
  misc_feature (1)...(282): n = A,T,C or G
tttaagaacccgaggncaagacccacctganttntagaatgagngacaaaacccnccntnncatnattnatnannaatttcaagangggcagctcgaanangcntcngcngnnctctattcatcntacanggacaagggtgcactcatggntttcagaggaattcctatctccgagctgacgaaccatgggattctccaggccctgacggnagaaaaccaatgggtggcanacaggtgntgggagtgaagaggncctaaagcccaggaagagtgggaagtgg

SEQ ID NO: 39 - DNA, 421 bp, Homo sapiens
  misc_feature (1)...(421): n = A,T,C or G
gactgaggtttctggacagacctagngcttcaccaagagaattcaacttggaaaccaagactggtagactctcgtttcttccgacaagaggcagaagtcagagagagactgcggattcttgggacacctgttttccttttggaggacaccgagttctttgagaagacagttcaatatggcaaaggaactgaaagaacggggaggagccgttactgtgatttggtgacggttcttcagacaaccagtgtcttaaggaaaactgggacagagaacttctgaactttttgggttcgttaagtgagaagtcagcatggctcaggtaaaaagctctcgagtcctccttcaagaccgttcactgggaagcctctttgcagngtcacccttgaattctgccttagccaacagtattgaccatccccag

SEQ ID NO: 40 - DNA, 240 bp, Homo sapiens
agattctcatgcctgtgacccaggctggtctggaactaattatgtagccagacttgcctaaaattcatggcagtcctcttgcctcagcctcttgtgtggtgggattacagacttgagcaacattcttcagtgcatttcttaggaatcttggctaaaaaaatccaagtttatcacacacaagttctacctttattggaataaattcaatcaagttctttgtgttccttccaaaaaaaaaaa

SEQ ID NO: 41 - DNA, 111 bp, Homo sapiens
  misc_feature (1)...(111): n = A,T,C or G
ggttaaggaacactgactgcatcttccaaaggtnctganttcatcatccnagcaaccacatggtcggcctcacaancatgtgtaangngatcttgacagccctcttctggt

SEQ ID NO: 42 - DNA, 542 bp, Homo sapiens
  misc_feature (1)...(542): n = A,T,C or G
tgagaccccagggccgcagctttggagccttacaagggcctaggccgctcgccgtacactttcccgtccccggacgacgagggtcccgcaggcaaaagaaggggctgnctagcactcgagaacgcttctgggaaatgtantccgcgattggaactggcggngaagatggcatccattctcggatttcccgccagagcacggcctgaggcaggccgaggagctcgttccncattttcaattttgtgcgtgaaattcctagacagatatacaaactcggacagaaactcttacaatgcattgagccccttccatgatagggggccaatctcagagaatcactgtatgtttttggagtaggtttgcaccggaagttgtgtagagtcgcgtgtatttctgggaaatgtagtctaaaaaaggaactgcgtggcactggtctcctggaacaaagttgttngaaatgatttctgagataccacaccctgagtctggacatttctgggccttgtaactcactgtangaattttcaggatgacaaaaaaaa

SEQ ID NO: 43 - DNA, 309 bp, Homo sapiens
gaactgagcaaatccaagctctgctggctccccccaagacggacgaggcagaaaagcggagtcggaagcccgagaaggagtcccggagaagcggcagggccaccaaccaccgacagctgcgatagctgcaaggaaggtggggatctcttgtgctgcgatcactgccctgccgccttccacctccagtgctgggattgactcaggacgtcaggttgtcctgtttggcagcaagtaccttcacctcctgagccatctttctcctaatataaataaacctttatattaaaaacaacaacaacaaaaacaaaa

SEQ ID NO: 44 - DNA, 538 bp, Homo sapiens
  misc_feature (1)...(538): n = A,T,C or G
tgagatctctgagtggagtcatttcctggtacagacttcacaaagaatgtgctgagaattctagtctgtgaagggaacattggcttaagccctcacgtggcctagcatttcttctcttcagtagcaccacatcacagaagaaaaatgtacgggagcgcaagaacaatcagcaatctggaaggcagcccttccaggtcaccacgtctgccaaggtctcctcgtttgggccaccgaagaacaagcagtgggggagggggagggacaggcaagactctgtctatggagaatatccagtcccttaatgcagcctatgctacgtctggacccatgtacttgagtgaccatgaaggggtggcatcgacaacttacccaaagggaaccatgactctgggcagggcgacaaatcgagcggtgtatggaggccgggtcacagccatggggagtagtcccaacattgcttccgctggactttcccacacggatgtcctttnctatacggatcaacatggagggctgancggnttatcccaccacccca

SEQ ID NO: 45 - DNA, 501 bp, Homo sapiens
  misc_feature (1)...(501): n = A,T,C or G
tgaggcttccctttccctcgcacctgtcttgcgcttttgacancaganaaggaaaattctntgnagagncctaccttgccagtggcgcccttaagcggttaattttaaatcttgatccattaccaactaattntgnagaggatacagtcagaactatttggcttccaatgggntacagaaacagngctagtctattcctgtagagagctctttcatttatncaggcaacagatatttaacttggagtccttgnnacaagtcagctgngattttgngaaaatanccaccttgcacgccaaagcngacagtnttaggcaacaatgtgtagtgttccttcactacattaaagttttcatcttcaggtgncttgnaagtaccggaagcngagagccacagncgccctgcccatccctatgaggctntgnaagcccancttcccttcattgntggtcgatgaagctcccaggatnactnctggacatntggacatttagctggact

SEQ ID NO: 46 - DNA, 206 bp, Homo sapiens
  misc_feature (1)...(206): n = A,T,C or G
ttcctcggcttcctcgggancccgnggacccctggatatantgcccnantgntgagcccgctaaaagccatngtngaccccggcccggcgccgcctnatgagggacttnaaaggaggntacaggaaagatcctccggccggagtgangnggggctccgncggagaacaacttaatnggtttggaatgcggtcattttttgggcccg

SEQ ID NO: 47 - DNA, 159 bp, Homo sapiens
  misc_feature (1)...(159): n = A,T,C or G
aatgcacaatgtaatnagaacaagggctgaccatttgganagacctttatttccttgacgctcccgntctttntctccancgnctatcgtntctcatcnaatggctgagctctgtgngcgtcacgaaggcatcttaacctagntctacggccataccat

SEQ ID NO: 48 - DNA, 329 bp, Homo sapiens
  misc_feature (1)...(329): n = A,T,C or G
aactgagggataaggagttcagctcatggtcgagcgctttcctgggataaccaaggatcttggttcaatttctacagaagaaatggctttccagactgtagtattatggattccaacctgggttgtgtttgcttgtttttacattttaaagccaggtgtctgaaatcccancatttggctgactgaggtaaagagggtcaaacnccacccanagcttcctgaacgggngtnccatganagccngctntcctgnaattattgccctgggagatggatnaggatnncacgggtanggagagggtggaatgctacnaatctaggcgacactc

SEQ ID NO: 49 - DNA, 452 bp, Homo sapiens
  misc_feature (1)...(452): n = A,T,C or G
acagcattataagtcagtggaggaatangataaatgaactgaaaaatctaactatgtcaaccaaaggagctctggtctctgacntaaaagatggggtcagacaagcancgcctgccnnnngnatttgnaagtnngcaagcagggggngntntgggtcnccangctttccantgaataacagcaccancagcactgttcatgaactttagaatttaaaacaagccctggncttgccactcctccttccggaagcacttcagtatttggaagtcacccagcctttggggctgggccctntgcgggntnctncatatttttcttcactccagcctttggacttggggaaacctgaanccacgtnnggntgcatnattttcggntnaagagccctgaagcttccaggttttgcatcacctggggttttganngatttncagcctccatggcaggga

SEQ ID NO: 50 - DNA, 230 bp, Homo sapiens
  misc_feature (1)...(230): n = A,T,C or G
tctggggttctagaaccactttctgctagagcaagggaccccaccctgtcagctcttggcngggaggcaccagcatccacaacgcccatnctcggtgggtccctgcaggngggattaggacaaccccanggngaggaagcagaaagcactttttggggaaacctgctgtntgccactagacacangttcacaggagaccanggaggtggnccccgggccgatgagggctt

SEQ ID NO: 51 - DNA, 443 bp, Homo sapiens
  misc_feature (1)...(443): n = A,T,C or G
tgaggaactgaacctgggtccttgtgcatgtgtttcttccagcagatccaagtcttgctactcctgaccctatggctggtgtctgagcatactgatgagttagttcaacaaggccattcagtttgattcagtatttgtccttataaaggaagcctgaancattcaagtccaaggagngtgacagnagnatgaaacatgantcngacatggtaaaagcatactancaataagcttgctggtnactctttatagtccaggctggttcagaactcatattcctntcacctttgtcttctatgcactagggtacaggtgcacactcagatgcacagcttaatctagctcctttctaaactgaaacattcctgacttactttaaaactacggaaaacatttgagacatgtatgaatgtggncagaagagatttcagattagacctatt

SEQ ID NO: 52 - DNA, 120 bp, Homo sapiens
  misc_feature (1)...(120): n = A,T,C or G
ccaaatgcctttccaggctagaacccaagnctgngatctgctggccggacacancancagatctgcatgaggagggatcagacttcntttgntnaggggncggaactcgtgtcctgacaa

SEQ ID NO: 53 - DNA, 184 bp, Homo sapiens
  misc_feature (1)...(184): n = A,T,C or G
catctttggctgtgctacnctgnggctattacaatccntgccctactgagaagagtgtccncctttntacattttatnaagaccagagctgctgcctttgaacaattggtaagtcctcngggnagtnnccggagnactccattgcttttcctctgtctatnnnngtgggggggggagtgctact

SEQ ID NO: 54 - DNA, 278 bp, Homo sapiens
gaactgaggcaccactcgccctgcccaggctccgacctccacttcctctccccaaaatggcctcggttctgtgggaagtcacctccaggccccgggccagggaggaggccacagaaagctcctgagagggaaaacacccctcccgcagaccccacaggaccccgagttgtgcccaaaacctagaggctagggcacctggactggaggaagggagccttggggctggaaggagtgacaaagcagaaataaattgaatcctgatctttcaaaaaaaaaaa

SEQ ID NO: 55 - DNA, 141 bp, Homo sapiens
  misc_feature (1)...(141): n = A,T,C or G
aactgagggaggactttgtctttctggaccaggaaggtgatgtaattgctaccaccaaacctgagaacttgagctcaatcgcanggacccatatgttggttcttcaatttgatggataaagataactctgttcaagaaaaa

SEQ ID NO: 56 - DNA, 284 bp, Homo sapiens
  misc_feature (1)...(284): n = A,T,C or G
ccctctgtacacctcagcctgaagcctctccntgagtnacggggntaccatcccccaccagggcactaggntggaggccactgccaagcatggagcccacctggagtcccancgtngtgtctgtggtggcnnctgtggggctcttcctcgtactgctggccaagaggatgcttggctagaanaaccacccaggtttatcagagagcccaaggatcacattgtnttnttcggggaggngtgncctncttcgtagtgccaggccacngntaatcctaaagccacgg

SEQ ID NO: 57 - DNA, 109 bp, Homo sapiens
  misc_feature (1)...(109): n = A,T,C or G
gaactgagttgactttggggtgaggncccctttcacnactnnctgtgtgancagtacanncctactcgantttgattttgtaccttaattaccaatatgctaccgtcct

SEQ ID NO: 58 - DNA, 336 bp, Homo sapiens
  misc_feature (1)...(336): n = A,T,C or G
tctgaccttaattaaaccacaccaggaatntatatncggaagcctgnngcantccagacatcngngacttgtttangcngatcnccaagggggacttngggacngagtgtcacncnttcatgcntcaaaatntgttcagaaccaggangcctgtncatgacgaccatcaccaggctncggaagagctgccgngcagcgcttgcaggcacagagctgantgcncaggcgcccactgctgcagtgctcttcagagcacacacttcaccaattcctaccncancgttnctgctgnaaatacttgaaatcacgacactcaatgggggcttttgaaaagaa

SEQ ID NO: 59 - DNA, 358 bp, Homo sapiens
  misc_feature (1)...(358): n = A,T,C or G
gaactgagagtggagctgtcngaagcctgtggcacctcccctctcttagccacagccaactgttccatgacaagagcctcttataagtcatctggactcacaccctgggctagaagattcaagaccttctggcagtgcctcagaggaccagaagncaggagaacaccaggcagcagtgggaatggtaacagaanacctgctgncagtgggtttgtttttccaaaacgcccactcccatggggnggnttctccctcagctgagatacanatggtgccctcaatgcccaaacccagacctagccaaatctttactcccacaccatgactaaacttcctggctgctatcaaaaccacaaat

SEQ ID NO: 60 - DNA, 214 bp, Homo sapiens
  misc_feature (1)...(214): n = A,T,C or G
gaactgagagtcatttcaagcancctcctgctgccagggacatctttggagtgagcaccacacttcatgatgaccatganggctcctggncacgctgccataanatggntgntttgtatgcccctgattgcgctctgtgncgatggagcaactncaanagagaccctaccctgtgactaccatcagggatcncnggaagaacacccatgataaa

SEQ ID NO: 61 - DNA, 270 bp, Homo sapiens
  misc_feature (1)...(270): n = A,T,C or G
agcctatcttgaggaactctcaanggacncncagggagaacnggttggntccattttcacctntctaagagatnagantctcacaggcnngnggnttacatcacattcttgaaaactcacactagntacttctggcttctttcacccttattggtcttttttgttctgctgtgccntgctgngctncgangnnggggggggnatggattggngnagagtgtgnccaactctctggataggaacttantgntggaaaacttacccatgctg

SEQ ID NO: 62 - DNA, 256 bp, Homo sapiens
  misc_feature (1)...(256): n = A,T,C or G
actgagtgaatgcgtccgcctgaagcccctgacatacagcctgacatattcagctatctgctccacctgatgtacacagggaagatggccccacagctcatcgaccctgtgaggctagagcaagggatcaaattcctgcacgcataccccctcatccaggaagccagccttgccagccaaggcagcttttcccatcccgagcaagtcttccctntggcctcatccttgtacggcattcagaatgcaaaaaaaaaaa

SEQ ID NO: 63 - DNA, 405 bp, Homo sapiens
  misc_feature (1)...(405): n = A,T,C or G
aactgaggtggggtctttcacgggggctgtggaagctgtggaggtcgtgaggcactgagagctgtcgcctcggtggtggcggncctcatcttcttcccctgtctgctgtacggaacatacgccttcctgcctttcgatgccccgaggctagccccaccatgagctcccgcttggnttacacccttcgctgtggggtctttgccagctttcccatcgtactcnggctccttgtgtacgggcnggggctatttgngcttttctgcgcttcgagcccttcggcgagccgaggngggaagnggagatncacccggcagnacnngggcccaatctagngcaaggtcttcancctctacttcnttaaccctggggtgggctttcaacctaactgggccccaaggacaccct

SEQ ID NO: 64 - DNA, 286 bp, Homo sapiens
  misc_feature (1)...(286): n = A,T,C or G
tccgcacgcataccangaaaacacatgncnnggnatccnggcaaagattaatgccatgcctctggggcncagactcnagggtccttgtcagcgcctntcanganggnaaacttnatcatctggcacanttataccncaaacaaggtntnatagccatccctctgcnctnctcttggctcatnacctgcgcatacgcttccttctgngaattatgtggccctgtngnggcctgnatnacatcatgctccatttncagcctgaaaactcgnctaggggaaggcgcgga

SEQ ID NO: 65 - DNA, 241 bp, Homo sapiens
actgagcctgaacctggctgctcaggtttcactgttatcgggaagagagcatgtggtggagcctgccgccctatcattctgccactcccactgctgctgcctgctgcctagctgttccggagccaaacactgtggtcacctgcaactggactcgtaggatgatttggcaggaatgggccccttccccttcttcataacccagtgtctggaatagtaaaatcgaaccttgatcagaaaaaaa

SEQ ID NO: 66 - DNA, 128 bp, Homo sapiens
  misc_feature (1)...(128): n = A,T,C or G
cccaagcccaactgtgtgngctcttatccaactgnngatnagcccatgtatntcacgctgctgnaggcacctttgggaangngggncaaatcaacctcataaaggatgatcgacaacaagaaactacg

SEQ ID NO: 67 - DNA, 348 bp, Homo sapiens
  misc_feature (1)...(348): n = A,T,C or G
tggtgtcatggaaggggatttactttatactcttcctgtttgctggaagcttttttggangtatttttatgctcggccccattttacctttgatgtttataaacctgtcgtggtatcgctggattagcagccgtcttgtggctacatggctcacacttcctgtggcattgctggagaccatgtttggtgtgagagtggttataacaggtgacgcctttgtgcctggagagcggagcgtcatcatcatgaaccaccggacacgtgtggactggatgttcctgtggaactgtctaatgaggtacagctacctcagggtggagaaagatntgcctcaaatccagtctcaaa

SEQ ID NO: 68 - DNA, 313 bp, Homo sapiens
  misc_feature (1)...(313): n = A,T,C or G
tattctatgacagacngtttgggagatatctgcagganggatntttanacattacagaagacaatacncgctaatgcnnntgnaggtttacagccactgcctttttgctattacgctaactgtactcctgcactacantgatggaggggnctggccttcatgtgacctattgtttcaggtcgctttggcaggagtattataccttcatgtgggctcccttgccaaaagaccaaaacaaggattcagccacacagcaggaaaaagnnntcctaaataatttaggatgacnaaccaaatagttcaactggttaca

SEQ ID NO: 69 - DNA, 199 bp, Homo sapiens
  misc_feature (1)...(199): n = A,T,C or G
gactgagaaatttctaatgacttggtgaagaaggaaaaccgtcagaaaggctgaagtactgccatactaggcagaggttgnaccgtgagnncatnanatatnttacttacgccactaaactnttcatgnccctgnctnactacagnatatntatnagcttntggagganggnctatcctatnatttcttatatattgag

SEQ ID NO: 70 - DNA, 248 bp, Homo sapiens
  misc_feature (1)...(248): n = A,T,C or G
cccacagagcaaggacattgcnacantnttctaatgccagtgcttgggaggtggagagctggagaatnaactagtcncaaccccgctttctncctggactatggnngacagagnacctnccccnaagctnncaanagcaancnncttngacccttangaatagaatntggntnaagtttaccgcttggagaagattntgatcagaagaaacatagattaagagaagagtttnttgcaagattatagac

SEQ ID NO: 71 - DNA, 154 bp, Homo sapiens
  misc_feature (1)...(154): n = A,T,C or G
gcctaccagcatttgtgngcctgcgncnagacagggtcgacctgactgactgangntnnantatgctatantagcatnatgaactttactcacacagcacacattataaatggacgnttcctgggcnaaaaaaanttttttttgtggcgggggt

SEQ ID NO: 72 - DNA, 241 bp, Homo sapiens
  misc_feature (1)...(241): n = A,T,C or G
tgccatacccactgtggnantacccctgcctgaagcctctccgagcggcnngagatnctagantnttgattnccagcagnccatcccccaacagcctatgcaatccaagggcacaatggagctagacatnacccgagcaagagccatggggcatgncctgtngatggagnatcanntcactccagacantttttntnagcactgggcngataaaccctgcaaaanacaagggggactgctg

SEQ ID NO: 73 - DNA, 262 bp, Homo sapiens
  misc_feature (1)...(262): n = A,T,C or G
tttcgtgaaagtgccanagttccaggattctcttgtgacctctgaggttcaaaacctgttgtgatgactgtgagaggttaaaaatggattctaggccagcatggaagtgagagctcagaagcacaagtctagacctgatggtctttctttagagaacagggttctgagcccatggacaccttgttacccattgtgnagncactgatgnnctnnnctnncannntcnnntgncttaccctctcaagtgctgggattaaagttg

SEQ ID NO: 74 - DNA, 492 bp, Homo sapiens
  misc_feature (1)...(492): n = A,T,C or G
tactgagctcccctatantctcctacccattcaccacttcttcgactccgntggatgagaaccanntttttccaactcgntctacacttgancatatcatgaanacatncgttacaaatgaagcananngctgcacaatgaggtgtcgntggatgcgacacttntgagttaccctaaatntcccangtctgnagancgnncggcgataggacttggaaacagctgcgatggattcnntcncaggtatctcaaccacctcnnagggtgcaagatgcacgcgccggggcagntcctcctgttcagaacactcagcccacagctgactcccacttccgtacgataacgcaagatggtgggaccggcnattgaaaaccacattcangatgtcggcttccggntttcccggcagcnncccgcgtggctgccggggccacacccacttccggttcccttgctccggcatggctggcttanggacctggctggccagtg

SEQ ID NO: 75 - DNA, 242 bp, Homo sapiens
  misc_feature (1)...(242): n = A,T,C or G
ccgggctcctttgcgtctgtntnacaggcaaccacnctggccanncgtttctcaggtgcagtggatttcctcacagagcaggtgttatttaggactggaggcagggatgagtactctgggactggaaaccatctcctccctaaaagggaaacttgacttataatggntctccttgacagttaatacccaagcttgngcagntatacagacttgcacncagaccctattatcacagagaattg

SEQ ID NO: 76 - DNA, 142 bp, Homo sapiens
  misc_feature (1)...(142): n = A,T,C or G
gccctgaagggtgcgctcgngggcgtacaaccacccagttttttgaatgcacaaggtggacagggcccctggccttcttctgacggaggannggatgatgcggncagtgacaccatcantgagngaagatgccattaaaggg

SEQ ID NO: 77 - DNA, 218 bp, Homo sapiens
  misc_feature (1)...(218): n = A,T,C or G
tttcctgttggggcccatttggagcggataagggacaggagaagaaatganggaaggcgcacgagaagagcctggagatggagatgctttgctgttccacnctgcaggggtnactgggttnactctttagtnttgcncnggcatctatactctcngcctcntctgatctcttgtgcttcagccngtcanggtggggntggcttggctttctttttttt

SEQ ID NO: 78 - DNA, 331 bp, Homo sapiens
  misc_feature (1)...(331): n = A,T,C or G
agtcttgcagtgttaagtgttttcctcagggtgctcatacggtgaaaatcatagatcangccacctttctgtgagccttcagctgagtctaanaggtgttattgatcactaatggctttcacggatggttttacctgtcctgcataggtngcttgggatcagctgggatctgatgtagcatcctcttcactgcctactaggatgcagtactnggcgcgggtggcctttgcctgggatggcacggngctcatgtttaactgggcacccagngctcatggttagcccggcatgggcggngnctctattggagctgcgctcactggggtacaca

SEQ ID NO: 79 - DNA, 168 bp, Homo sapiens
  misc_feature (1)...(168): n = A,T,C or G
gactgaggttgataggacccaggccgntttantggccagnntaanacctatggcatcngcggggccatncncaggatgggcgagtcancatganccctattcntncgattggctaaggctgatggaattgtctcanacaactttttgagcngaagaaatgcgggaatt

SEQ ID NO: 80 - DNA, 345 bp, Homo sapiens
  misc_feature (1)...(345): n = A,T,C or G
actgccccagattttcgtcggtagancctaaacatcgcgtccttagataaagacttagaanaacaggaccttggattgacaggtcccaggtcgctggcaggccttcccccagtatggatgcgcatgnggattaacttatggaagcctttgagttcattngttctcagaaattagttcgagaatgnnatgtgaatggaatcttcttaacccananggtnttttttntaatacataaccatttactttagtgaattgttaaagntgataacattcgtttaaatttttttacaatagcatttatgcaatggnantacagaaggtccgtggagttatatttttattcaa

SEQ ID NO: 81 - DNA, 447 bp, Homo sapiens
  misc_feature (1)...(447): n = A,T,C or G
agccaggaggctgaaaataacaattccacaacatcagtnncnggagttggaactaaagcgtcagaggacgcacgtgaccggtgagcagagactgccagcctggtgcagaaaagcacacagcagagctgctgagggagtgggggtgggaaggggagaaaaattctcttcagaatgcatcgtagctctggctagcaaaactggaactggatacaagctgcagacccaaacttctcatgaccgtgtgagaacacaattcaagaacattggaggctgcaccaggtataagcaccgccagaggccatctgacagtctggtacggtgctaagagcggtcaccagtgtgcacagaagacatctttgagcgacatcttggnttacattgtccaggaacacggccntgctgctcgaagagcttgaggaatacatccaaacacccatttaaaagctt

SEQ ID NO: 82 - DNA, 292 bp, Homo sapiens
  misc_feature (1)...(292): n = A,T,C or G
ggcccaggtccccgtttcctggggctgnggaagncttcaagctgttccagaatccggntcaaccggagttactggaacccagcagagnacactcgccngccttgagcatcttttgcccacaatctggctcaggctcataggcttcagcaagaaanactttgggnacagctgagtttgggagaagactccanttnagtgaccctccagagggangaaggaaggcncagntntttttttncnggagagggcancnngaaaaggnagcnccccngcttgaaacaaaaaaaggaag

SEQ ID NO: 83 - DNA, 324 bp, Homo sapiens
  misc_feature (1)...(324): n = A,T,C or G
gactgagggacgcaaggacacacggtaccccagnttggtgcaatggactctgacatatggaggtgagggatcacggcagncataaaggacnggctgntgatgtggctaaacttgtagagtgccaatctacctgatgcgcagcaccacataaaactggtgtgatggcaactggntgtgatggcaactgatgtgatggcatacagctgtaatcctancacttgggaagtagagaccaggtgatccgtagtttgaggtcacccttggccacacaataacatccaaaccagattgngctacagaaaaccctgtctaagaaataaaaag

SEQ ID NO: 84 - DNA, 238 bp, Homo sapiens
gactgagtgtcttctctagttcctgtccttgctgctttttgagttcttactcagtcgtggcaccctgaggagagtcagcatcacagggcgtcggtttcctgtttcttcattaacctaagaattcagacaaaacaaagctgtccttaaaaaacaaagtcctactccttagcctgagaggactatccccttttcaataaagtttacattataagttgagcatgtacctgcaaaaaaaaag

SEQ ID NO: 85 - DNA, 140 bp, Homo sapiens
  misc_feature (1)...(140): n = A,T,C or G
ggtgagccggctacagggagaccctctttcccttctccaacatactcacatactgcncatctgtaatcccagnacttgagaggcagaggnaaaaggattgctgngaattggaagccatcttgagcaagatctggtcttta

SEQ ID NO: 86 - DNA, 263 bp, Homo sapiens
  misc_feature (1)...(263): n = A,T,C or G
tacctgcaggcatccancaatgtgtccttagcagcagacttgctgtccccagtgtgtaaggcccaggctttgcccattagtctgtgactgaaaacaatccccctgctccaagcagcctccacaatgactaccccaaatccctaagcagattcctggacttggagagagaacagctcagggcatgaggatctaaatgcaanagtcctactcantttganaaccagtaataaaatccgtgtgtggtagcaggtaaaaaaaaaata

SEQ ID NO: 87 - DNA, 324 bp, Homo sapiens
  misc_feature (1)...(324): n = A,T,C or G
gaactgaggtggggtctttcactggcctgncgctggcactctgcgcatccgtcccaaggatcgaaccttccgctgcgcagcccgcgcgccccttcagaggctcaccccactccgccacgcgtcctcgggccacgtgactgcacgaccaccgcaggggacccgaaaggatcgccaggtccgggtgggccagcggcgcttcagctctcctgagcccagtatccgtgcctccgtgcaaccggatgttagctgccctcctccaacttcagctccaaagccggatggacaaaccgacgggcaaataaaagtctgagatttagaacagac

SEQ ID NO: 88 - DNA, 118 bp, Homo sapiens
  misc_feature (1)...(118): n = A,T,C or G
ccaaaattcaggatancnttgctggtctcagcttgtagccctgcctggaaatcctgcctcaaagtctcaagtgctgggtgacaggtttgagtcaccgtangtgctgatgtatctatcc

SEQ ID NO: 89 - DNA, 385 bp, Homo sapiens
  misc_feature (1)...(385): n = A,T,C or G
actgaggtggggtctttnaagcacagtggaatggagtcagccagagcctagagtgctacagagggcagagctggagaagngacccaagacctttgggggagcacagaagatcatgtgtggatcctagacactggaacaagaacctgtgaagttaanatgccttgnagacccttgagatattagaagattgccnccgtccgnaggataccctcgctngaggaaagcttactaaccacggagtaagnancaacanaatggtgaaagggagaatgctattccnaaacgnganaancccgnngtttnggagggttgtcctggcttggnntttgggccttgcttaagtccnngtatttttcttnaccnntgataattttgggaggtatat

SEQ ID NO: 90 - DNA, 450 bp, Homo sapiens
  misc_feature (1)...(450): n = A,T,C or G
ctcataggcatttggagaacagaagtaggacaacngagaagttttattagcctcncnaagtttctggtntgtggattattattctgcttcaatattttgcggacttaanctgacagaagaacacnctacactccccaccctcnntgtttgccctngntctntantacttcaganngtggacttnagactaggtgtcgantcgccatcngccatcccattttctttgagggagcatcanaaggacctncccgccagcctcccggnccncnccccgngcgagncaggtgncatccaggtttagcaanaaaacttggggncnntnanaaggagtngtggagcccacgcgaggggaggaaaaaaggagagggccncggncccgccgaagggaacngngagggaatagtcccattctttnggncanaaccnnggagggaaggtcttttaatggaa

SEQ ID NO: 91 - DNA, 312 bp, Homo sapiens
  misc_feature (1)...(312): n = A,T,C or G
tcaaaggcatttggaagacagaagtangacgacagagaagttntattagcctcncaaagtttctggtatgnggattattattctgcctcnaantntggcggacttancagangaaaaacacctagactcccagcctgttnttgccctttgccttattacttcagatgaggacttagacttggtgtcgaatcngccntcgccatcccattatgcttcgnngagcatcantagngacccccccgtcagtctccggccacnccccgagcnagtcaggtgtcatgaaggttttagnaggaaaactgcggcccttga

SEQ ID NO: 92 - DNA, 444 bp, Homo sapiens
  misc_feature (1)...(444): n = A,T,C or G
aggagctactcggttcaaaggcatttggagaacagaagtaagacaacagagaagttntattancctctcatagttnctggtntgcggattattatttctgcctcntattntgcggacttagcgangaanaacacctacnnctcccagcctgttcttgcccttgccttagtacttcagatgnggacttagncttggtgtcgaatcgccatcgncatcccatttgnttgaggagcatcattaggacccncccgtcagcctccggccacacccgagcagtcaggtggtcatcaggnttagcagggaaaactggtgccctnataaagggtgtggagcccancgagggaagaaaagagggagaggcactgnncccgggaagggacgggaaggaataantcccttcttntggncnaaagcagggggaagggtcttttattgaaagcatct

SEQ ID NO: 93 - DNA, 494 bp, Homo sapiens
  misc_feature (1)...(494): n = A,T,C or G
ctgaggtgcaacgctgaacttcaagtcgaccggtacactaaaattaagtcgctgtaactaaaatggaaaagtatgaaaagctagctaagatcggagaagggtcttatggcgttgtattcaagtgcagaaacaaatcttctggacaagtagtagcgatcaaaaaattcgtggaatctggaagatgatcgtgtcgttaggaaaatagccctgcgggaaatccgtatgctgaagcagttgaaacacccaaacctcgtgaacctcatcgaaggtgttcagaagaaagagaaagatgcatctagtttttgagtactgtgatcacacactggttaaacgagctggagagaaacccaaacggagtttctgatggagtgattaaaagtgtgctatggcaaacccttcaagcccttaacttctgncacaagcacaatngtaagtaatattttctaatgctagggaagttctcttgtacccgatgcttctgttggagagaagga

SEQ ID NO: 94 - DNA, 194 bp, Homo sapiens
  misc_feature (1)...(194): n = A,T,C or G
ggaacctcaaagaggatgccactgttttggaactattttgaaggcgcagccatcactagctttagggacagggtattttntnacagcnncagaaatagnatccatancagctccanaataacaanntgcttgagtttcttggggactanaagatgacacgatannataaagacactggccaagcatgacctcca

SEQ ID NO: 95 - DNA, 115 bp, Homo sapiens
  misc_feature (1)...(115): n = A,T,C or G
gactgaggtgccaccctaccaaggtaactgcaatcttnangnccatccctccaaccactggatctgctgcactgnctgaagntnnggttnctnngccanagcctcaactcactca

SEQ ID NO: 96 - DNA, 478 bp, Homo sapiens
  misc_feature (1)...(478): n = A,T,C or G
ctgctacatatgcgtgaagaatggcactccccatcatagtntnaatggggtgggcaggagtactcagtgaccacgctctcagaagatgatactgtgctggatcttaaacagttcctcaagacccttacgggagtgctcccagagcgccagaagttactagggctcaaagttaaaggcaaacctgcagaaaatgatgttattnttggagctctcaaactgaaaccaaatactaaaatcatgatgattnttttactcgtgaggagagcttggaagatgtcttatgtcctcctccncccccccgatgatgtcatcaatgattttgacattgaaaaaaaagtagttgaagtagaaaatagggaggaaaacctcctgaaggtctctcgcagagtcaaggagtacaaggtggaggtgctgaaccctccccgggagggcaagaaacttcctggtgctggatgttgactatacactggtttggtga

SEQ ID NO: 97 - DNA, 440 bp, Homo sapiens
  misc_feature (1)...(440): n = A,T,C or G
cagatccagcacgcatgtggagaaagcctggcttttgtgagntgtcnnactctnagctcctcctgcnccangcccgcctgnntagcatgcatgcttcccaccttgatgatagatggactgaacctgctganatgaaagctgcatggacccccagtagacacncagactccantatctgagaaangngcatcatgaaagatanatgcnggcctncagctattnactaggggctntannnctataaggntgcanncatagnnttccanaangcccaaagcntgttnttgattanangcnctttaaganttttactcaaataacatctanaaactggannntctntcactataangntgnaatnatagtattccagaatgcccaaagcatgttcttgtttaaaagcactttaagaattttactcaaataaaatctgaaaatgt

SEQ ID NO: 98 - DNA, 188 bp, Homo sapiens
  misc_feature (1)...(188): n = A,T,C or G
tcccacatcttgaatctatgttgcacaccctgatacatgtgaacgtgtggggccctgaaaggcgagctgagatttggatattcggaccgccgcctttccgaagggacgttgaccggatgctcactgatctggctcactattgccgcatgaaactgatggaaagnaagtaanggatgggacgggagtgg

SEQ ID NO: 99 - DNA, 108 bp, Homo sapiens
  misc_feature (1)...(108): n = A,T,C or G
ccctcagcacctttccctcctgtgccagcactgaggaaggtccctgngttctcgtggngcatggctgtttcnaggaaacangggagctttttgccagcccatttggcc

SEQ ID NO: 100 - DNA, 124 bp, Homo sapiens
gactgagaacctcaaactcactactgacggagttcgtcatccatccctgcctcagaagatggcagctccatcgtccaggtgctggggctgaaataaaactccatcatccctcattcttttccta

SEQ ID NO: 101 - DNA, 131 bp, Homo sapiens
  misc_feature (1)...(131): n = A,T,C or G
attttgagctcctcttggacacgntgctcctggcttngaaagatnccacttgggtttgaagatgccaaaggctgcttgngatgtggccttgaacttccgnctagaaagaggntctatagaaatcactcttg

SEQ ID NO: 102 - DNA, 133 bp, Homo sapiens
  misc_feature (1)...(133): n = A,T,C or G
gcagacacatttccagntgattgaggtggccagtgacattactcccgtgcgccttacccatacttnagtagcnggcatttctcattgaactgtagaccaccttttctgtttgagnccggaacgcagtttcagg

SEQ ID NO: 103 - DNA, 151 bp, Homo sapiens
  misc_feature (1)...(151): n = A,T,C or G
cacagccacactgctgnagctngccgctttgctgtgacgaagccatcacagnggtcacctgcaaccttantcctagattatctcggctggnaatcgngcccctccccnttccttcataacggagngctggaatantaaaaattgaaccttg

SEQ ID NO: 104 - DNA, 413 bp, Homo sapiens
  misc_feature (1)...(413): n = A,T,C or G
acaaggcacaaaattttggggnacagacnctcaccaactgttcctggggagccatctcccttttcagtatctnagattctggaagactcggntgacttcctaaggactgcatcctacagaagatacaactccatggtgttctgaaaggttggacaggaagtgagcagaggacatgaccagtgaaaacagccactgtttctatgcctgctattatgctttttttgaatggctgacngtctatctggggcaagggttctcagacactgaaggaccccacttagaatcttaggttgnaagccccctgtcaatgtcatggcaggaggcagcccttggaaagtgggctttgtaatgagnggtaggtccccatttcctgacagaggntgctgggagcacaaggagactaggcacagtaa

SEQ ID NO: 105 - DNA, 322 bp, Homo sapiens
  misc_feature (1)...(322): n = A,T,C or G
gcaataccaccttgtgacnncancgccacttgacatgcgaggccttgtacgntagacatanngcngggangncnangtcnnctcaccaacaacatccancttgctgnaggctnaccccgnaatgaaagaaagcaaagacaggnnaancngggccgagnaagcttgntttaggggatgggctgtttcncancaggcggtncccacaggtggtccgaatcttccgggncccaaaggctcacttctctttttaacaacaggtttctgccgattccagcatcacttggaaacccagatttttgcncacacatgcaaatccacctag

SEQ ID NO: 106 - DNA, 241 bp, Homo sapiens
  misc_feature (1)...(241): n = A,T,C or G
ggacgacaatgaaggagntgagattgacatggagtcctgncngaagcatctgaagaaaagggattctctgantttgaggcgacctgnaggaanagttcttttccatacttgncatgatncttttttcaaacctganaactangaagggnnttgggataaataactantgactactgannctcctantggagagcngccgagggngtgggacanctgcngacaanatacttgtggtggcatt

SEQ ID NO: 107 - DNA, 343 bp, Homo sapiens
  misc_feature (1)...(343): n = A,T,C or G
ttccacatagatgagggcctcattcngccatcatgagntttagtgagnctccaggagagagcganacaganacaganactcactcnncatcaaacccctcttctcagggttcagagagccagggagaagagacagananatttttnngaaccagagangaccctaggaaaacngngncttncagacacancngcnctgacacacatatatgaactcctanaantaggatgnctcagggcctgaatagggntcaagacagatggagncctagaacaggagaagcaagaagacatgagctcctattcctaagaagctgtntcccacctgataccctgcttgcaaa

SEQ ID NO: 108 - DNA, 492 bp, Homo sapiens
  misc_feature (1)...(492): n = A,T,C or G
tgtgaccttcacgtttagagccttttagctgcctggttgttgtatttgccaccctgaaagcgctccacctctgggaccttaaaggttgatagtttactcttagttatttatggaaactagtaggaagtctgcagttgaacacgaggcaacttctctctatgccacgtggagctgtcaccgacttccacctcagagacacacaagcagaggagccacgtgcagcttgtgagaactttcctcacagaaacccattactgtactccacatctgctctctggaataagcctgggatgaactggaggaggaacttcagcggctgctctgcataaacactggagcagggcggcgtcagggtgggactatgcgcgcagccacaaaggcaactcctgctagaggacctaattgaagactgnggagagaccaaggattgatgacgcanacaaagccagccaatcgggaactgctgtttggaaganatgcttgctggggacc

SEQ ID NO: 109 - DNA, 198 bp, Homo sapiens
  misc_feature (1)...(198): n = A,T,C or G
ccatcactactgattcatattggtagttnactattgaactggactgctggcatcctgacaatgaaaaatggaatcgccccaagaaattatttctaaacaggtctagaacactcttttcctattaacttcttttctccctacctctggttgatgaattagaagagaggntgaagattcaagaaccctaaataaaacagg

SEQ ID NO: 110 - DNA, 274 bp, Homo sapiens
  misc_feature (1)...(274): n = A,T,C or G
tggggccatataccagnctccatgttctcagacccacaanctaaaagttngaagcaaggcagtntgtccagtcngagancaggaactcaagtccaaaacagnctgcctgtctccactgtcagggcactcagccagctcnnaggtcagnatcngtctttgtcccngcatcagcttgtctcaccaatcactctggcagctagcatgctcctgctgcngcattctgtggagaaaacacaaaaatgccctcttccccatattaaatacctgaacagta

SEQ ID NO: 111 - DNA, 166 bp, Homo sapiens
  misc_feature (1)...(166): n = A,T,C or G
tctgagaggcactaattgcagcattncataagcaagatcaaagcacgcatttgaagngttcgaccatgaatcnaataatacagnacatgccgagatgagatngccacgatnatcaggccnttacgncgctgcccgactnnagnagagctgcatgatttcattgcag

SEQ ID NO: 112 - DNA, 222 bp, Homo sapiens
  misc_feature (1)...(222): n = A,T,C or G
cggggaaggagatgttcagcttcattttgacacagccgagcgcctaggaggcgtnactgantaagaggcctgacttcccaacagttncttgggatgccagaagagaatgtttgggcccctgaaaatggagtcgcaagcagccgngagcagcctnacatgggtatcaagaacagatttnaggccctccacaagagcaggangggctcttaatagctgagccat

SEQ ID NO: 113 - DNA, 201 bp, Homo sapiens
  misc_feature (1)...(201): n = A,T,C or G
gactgagggcaggtgagatggctnagcagttnaagcagnttgttgnacgagcntcatgcacctgngnncattcccagancccatggaanagatggaaggngagagctgacttgacaaaantgtnttntgaccantgtacacggactggagccncggactgcattgttcaggaaaataaagcaatttgtatgaaaaaaaaaa

SEQ ID NO: 114 - DNA, 434 bp, Homo sapiens
  misc_feature (1)...(434): n = A,T,C or G
gaactgaggtggggtctttngtgctgtggctcctcgggtgagggaaacaggactgcacggcgcggagaggacgatcgccctactgaaaaaaataccagatcttacnaaacggctcacgtagggnaagatgccggccacacagaagcccatgaggaactggacatacggaagggcacaccgaagtctgctttgatgattctggaaggtaagcntntttggaancaaaggacggntccagcgngaatggttaagacgnnattcttggtatggacagccggtcgaagatgaccggatgcggggggacagaggnaggaataaacaaggagcgccctntgccctgaggcttgtttncttttgaactgtcgtgncacttctangacctcangaaaatttaaaatcctttaccccagaggagtgccttcccgccactcacg

SEQ ID NO: 115 - DNA, 147 bp, Homo sapiens
  misc_feature (1)...(147): n = A,T,C or G
aggcctacgtcagggccggangtcctgacctcaagatgnacccggataccnccatgttccatgcttccacnngtanctgccannngangaatttcncactgccccatncctcctgcttgagaantacttcctgtttttccattgccc

SEQ ID NO: 116 - DNA, 322 bp, Homo sapiens
  misc_feature (1)...(322): n = A,T,C or G
tcttgccagatcactgcgtgaggttgctcatccactctgcagggcaggcangacatacgttcccacgntntggacaggagcgtctcnaggcanagagtanttgacaacatggtaggcnttgncncnagnacgatggcgcccctggcacannaggagagtcactngcctntttggncnantattctgatattctncctgcactgttnccaaancgnncattggttnncctaaggncaaagacaacatttggtccccttgcanagggcanctctgaaccgnctntgactgntgggagggcaggcaaataaatgcttttggtatt

SEQ ID NO: 117 - DNA, 119 bp, Homo sapiens
  misc_feature (1)...(119): n = A,T,C or G
taggaagcagtgtaatgatctacagactacctnaggncctgcgnntacaccttanaagattcatggtggtctgnccgaaaccatcgtganannantgcngtccatgtcatctttgacca

SEQ ID NO: 118 - DNA, 237 bp, Homo sapiens
ctgagcctaagggaatgctgttctctgcactgaagtctctgtgccctcgagtcacgcctcatccccagtcaacgcgggaccaaccagccagaaggcttcagtttgtgcggcttacaaactgggggccgcaaagatgccctgcccccagcctctcctcccagggcatgccctactctagagctgctggtgaacaggccagccagggggaagatctccaggtaaactaataaaaaaaaa

SEQ ID NO: 119 - DNA, 304 bp, Homo sapiens
  misc_feature (1)...(304): n = A,T,C or G
ctttggatacgcatcaccccagnctgacttcctttccctgagcctcacctgccttcgaggagtngagtgcanaccacagcgcctttgctcagtagctgctcccgnctgtgtncagngtacaccctgcttcatggagcttctctgcctaagcngtngacatgactgagtgcttggaagncaatntttaanntgcacagnttacacatgcnnaaaaaagagccatctacccaacctnaccaagcacccctgcagatgtccatcctgaggntgnagatctnacctctgngnttactgtaagcgccat

SEQ ID NO: 120 - DNA, 143 bp, Homo sapiens
  misc_feature (1)...(143): n = A,T,C or G
acggacgaaccgtgtcaaagggntatgcaagncnngccancagacagcngnnacagacngngcaancntccaactgangaagatgtgagtattcttgggatctgggagcattcctgaaaaataagagattaaaaaaaatcaaa

SEQ ID NO: 121 - DNA, 414 bp, Homo sapiens
  misc_feature (1)...(414): n = A,T,C or G
ctggctcccctcgcctccttcctgacgtgtgtgctcagtagcagctaatgactttgtgtccatgtctctgcctacatcagggacctgaggtcagagcctcangccaattngcagaacctcntagnttntnctggatgaactgccattgctagaatnagtgaatgnngttcaganatggatgganctaccgtgctgatnnctgtgaactgaactgctgccctcntgacaannatngaaaatgncccaaagaactatnacctaancaggtccacatnctcntttgncctattaaccttcctctncactacctntggngggcggagggctacaagggaggtgaaagtattnaagnnatacntatnaangnangnttngnancatgnagctgaaggggnctgcagggcggggggaggg

SEQ ID NO: 122 - DNA, 355 bp, Homo sapiens
  misc_feature (1)...(355): n = A,T,C or G
gaaccttacaagcttntgagatgaagaaccngncangaagctggngnnacgggnaanagngtatncncctgngccctggctcgntgcgtgtngnctganccngctaancatgcacctnctgncctgcnacgntctanttagcnngatnggnccnggtagatcnattcttcacgcccgccggncgccacgatgcanacgggctacaggcgtcgtttcgcggtcgcggcctgcggggcgaggaggtagctgtgccgccagggtttgcgggattcgtgatggtgacggaggagaagggagaggggttgatagggaaactgaacttctccggngacgcggaggacaaagcggacgaggc

SEQ ID NO: 123 - DNA, 245 bp, Homo sapiens
actgagattaacacattaatgatgtcatccgttgtacatcctgaaagagcacctcacagagcaccacaggaccgggatccaaaggaacgtgcaaaagtgcccccgacccgtgaggctggagatggctacctgcaggcagtgatgtcctctgcatagcagaagtgttcgtcgctgttaacttttactttggttgagactttggaaataaaatctaacaagtgcattgtgtattggaaaaaaaaaaa

SEQ ID NO: 124 - DNA, 324 bp, Homo sapiens
  misc_feature (1)...(324): n = A,T,C or G
ctgtgcctgtctccatggctttcaggaccntctcttgtttgacctgnctcancacatattttcnctgacagccatcgtganttgtacngccagtggcctgcctttcaagttcaangtaanccttatcgatggagagagagagntnaagaccancttggactacagnggntctgtattaaaactaacaaaaantgagctaanaggttaggaagatggctcantanatnnnngcatttgccaacaacctgagttccatcccaggaacctatgaaaagactgagggacanaacgaacttcaaaagttgncctctgacctgctcatgc

SEQ ID NO: 125 - DNA, 389 bp, Homo sapiens
  misc_feature (1)...(389): n = A,T,C or G
tttgggaaagcacagggncctgtgctgtgtgcctgtccggcagagagcctggtgggcatggacatctttatccacataccttagtgtgaccacgccgacagaaanttnntaaggccctctctggtgccccagaataccatggngacctatcactatcctttctgcctttggatgtcccagcctggatctgtcaccaggagaggattgtgggcctccacgttagtctgtgaatgcacacttcgagtgacttgtgtgcaggttttgagagccggttntgcactagctgctcgacagctgctgccatggcccgtgctcttgcacatgcgccgctgngggcatgggaattgctgtgcagcctcagctgtgttgtatggctgctgattaaactg

SEQ ID NO: 126 - DNA, 396 bp, Homo sapiens
  misc_feature (1)...(396): n = A,T,C or G
agacccgcatcttgatggaacccacaatctcactgcgcagcactgttgccattggcactgacctggggacagcaggagccatgtgaggtgtgacctctaccacatctggctcaactgcaagcatgcagtcttccagctcaccaggtaaaaaggagttcccaccttctgtttgaggnaangnctctcactgagctagagttctcattttggctgggttgcagcacattgncattggcactgacctggggacagcaggagccatgtgaggtgtgacctctaccacatttaggctcaactgcaagcatgcagtcttccagctcaccaggtaaaaaggagttcccaccttttgtttgaggcaagggcctctcactgagctagagttctcattttggctgg

SEQ ID NO: 127 - DNA, 254 bp, Homo sapiens
  misc_feature (1)...(254): n = A,T,C or G
gactgagggaatgacaaggtctgcgtattcagcacagntatttctccagaatattatagtctgcagttgattgaacctggatgcagaacttggagccatgaagatcaagaacattgtaaatgcaacaataagggggaaatgcaattaaaaagtgggctgaaaaagtaaaaacagactttattagagaatatacacatggtatcctcagttgatagaatgtccccaataaatggcctgtcaggtaaaaaaaaaaa

SEQ ID NO: 128 - DNA, 211 bp, Homo sapiens
  misc_feature (1)...(211): n = A,T,C or G
acgacccgcctgttttcccggggtanacccccgcccttcagcatggcatgaagaggagccttttnattagnnactcacannnccgcagccatcaaacaggcagcaaggcttcaccagcaagaccgaaacaggagcaagggggctggngaganggctcancaagtaaggagcacccgactactcttctngaaggnccggagttcaaatccca

SEQ ID NO: 129 - DNA, 451 bp, Homo sapiens
  misc_feature (1)...(451): n = A,T,C or G
ttgggactacatggtaatcccatgatatagctgactttccccgacccgttcatcacaggatccccaacttcaaggggtcctacctggctggccagagcatcagagacctggaagtctttgctgggacacaggaagtgaaagtggaccctgataagcccctggaaggtgtccgattcctggcactgcagagcaaaaaaacactgctggtcccaacaccacgactgcgaacagggctgtttaacaagancacgccaccccctggagccaccaaagacattctgaggaaatgtgccacctcccanagcaggctgggaancaagcctntgtcatttggaaccgntgacnggagcctgattgcctgtcaccagacactttcacagncctgctaaactggnnctggaaacncactngagggatggagagccagggttcgcgtcttacatacaataac

SEQ ID NO: 130 - DNA, 255 bp, Homo sapiens
  misc_feature (1)...(255): n = A,T,C or G
tagccagaaccttggtgttttganagccgtaaaggaagacctcgataagttcttcgggagattccaggttcttcagctcaaacatggcctggctcacctgctcaatgtgagacattcgagatccctgtgggccaaacagagatttcantaccagcgactggacctggaatacttctggatctttcaggtcttcaggaactttcacccacggggggatgtctttacgggtcatgagggttaccatcataattcctg

SEQ ID NO: 131 - DNA, 465 bp, Homo sapiens
  misc_feature (1)...(465): n = A,T,C or G
gactgaggacagcatccacgctgaaatctgctttttatactggttccatgacnaagtactgnaagtgctgtctccgagagaagagttcaagatcacctgntntatgtcctgnagcccctgtttcgaatgtgcnnagcaggtactaaggttcctggctacacaccacaacctgagcctggacatnttcagctcccgcctctacaacatacgggacccanaaaaccagcanaatctttgcaggctggttcaggaaggagcccaggtggctgccatggacctatacgaatttaaaaagtgttggaagaagtttgtggacaatggcggcaggcgattcaggccttggaaaaaactgcttacaaattttagataccaggattctaagcttcaggagattctgagaccttgctacatcccggtcccttccagctcttnatccactctgtcaaatatctgtctaacaaaagg

SEQ ID NO: 132 - DNA, 352 bp, Homo sapiens
  misc_feature (1)...(352): n = A,T,C or G
gtggagacctgaaccaggagtatcttattttttttctatacggaaacccttgagaatgaagacaccggaggaatatatcaanccttgctgtgccaaggccccgtggaactcacangggggaagaaanggancaaanggcattctatccttatttaatgatggttnctggttgagnctantaacctgtgagtatgtgcaacatgcatcctttagttatgacggnctacnacttngaatnaggctntttttggtncaaaacatnaaatatgngctttnactnctnntttttcttttaannatnaaacttatttcattactttnctgatnacaacttntttttcctttcatttgg

SEQ ID NO: 133 - DNA, 116 bp, Homo sapiens
gctgtctattgatggtatgtctgacagtggaccacagcttgattcaatgggtagtctgaccatgaaatctcaacttcagatcactgtcatctcagccaaacttaaagaaaataaaa

SEQ ID NO: 134 - DNA, 246 bp, Homo sapiens
  misc_feature (1)...(246): n = A,T,C or G
tgagcctttgcttccttactttgctgganaccagcatgctggagtcaacattcaagcagaccaggactgctgcctcttcctccagctgtgtctctctgtctgcgcagntgctttgatccatgtgggccgtctttgagattccctcctnganagcgcnctcagcatgtcancagcatcgaaatcccaagtgccggaggaggcancngcctgnntgcgaggaagagcccaagggaaaaacacttctca

SEQ ID NO: 135 - DNA, 216 bp, Homo sapiens
  misc_feature (1)...(216): n = A,T,C or G
ggacacccttttgccttggaccctgtctcaacctggcacactgaatgccctgcctaaagtgcccttgcaggttagnccaagttctcttntccctagccccagtgccacaagttncacacaccgctactgccagcgccagcacccctttgctggcttcnttttaccctatggtcctctgatcaccaatcanatgctgctgtgatttttttttttttt

SEQ ID NO: 136 - DNA, 120 bp, Homo sapiens
  misc_feature (1)...(120): n = A,T,C or G
ttcatagaccacctgtccttgctactgagcccactcantcaaagatttattatanngtccgtacactgtcgctgncttcaagacaccccanaagagggcatnanatctcattaaagggat

SEQ ID NO: 137 - DNA, 290 bp, Homo sapiens
  misc_feature (1)...(290): n = A,T,C or G
gtgaaacgggtacactatggcctctctgaagaggtttcagacgctcgtgcccctggatcacaaacaaggtaccttatttgaaatnattgganagcccaagttgcccaagtggttccatgtcgaatgcctggaaaatccaaaaagactgtacagtggaacctctggntacttggnaancatcgatnggnataggatgggngagcacatncancancttntatnttatnnnnnncacncngttccntgtgancntgtggggncctgatnaggngagctaagatttggatatt

SEQ ID NO: 138 - DNA, 101 bp, Homo sapiens
  misc_feature (1)...(101): n = A,T,C or G
cgaggccagcctagtctacatagcgagtnncccagtctatgtttctctccagccagaaatacatcctgtctcaaacaaataaattgataaaaggaaaaaaa

SEQ ID NO: 139 - DNA, 191 bp, Homo sapiens
  misc_feature (1)...(191): n = A,T,C or G
gaacccttgattcacggacatgccgacatgtagttgaacatgnnncacacaccngctgtgacagactgncngatanctgaacctacatcgtcnagcggaagatgnagcctttctacaggacagcatggagatgcaaggcaatacagagncatagaatgtcggccacccaggacgagggtgtacccggggcc

SEQ ID NO: 140 - DNA, 157 bp, Homo sapiens
gactgaggtggcagcatgccccgggcctccttgtgatgtcaggaggctggacagccaagaaagaagaaaatggactccctccttctgaagacttgcctggaagccagccccgagtgctggagtgcacagcgcctccaacgagaacagctaagaggtg

SEQ ID NO: 141 - DNA, 248 bp, Homo sapiens
  misc_feature (1)...(248): n = A,T,C or G
actgagggtcctgctagctccaccttgagcacactgggcagtatgggcttacagcagcaagaggaaagtggtgaggtcaccagccgaggagtggatggggagaagagagaacggannctcattgngaaatacattgtntcagctgnnaaaccggacaggnncattgtccaccangccangaggacaangggancaccaatctctatagcaggatttcagatggccgaggatnctaaactcagtgtcta

SEQ ID NO: 142 - DNA, 319 bp, Homo sapiens
  misc_feature (1)...(319): n = A,T,C or G
gactgaggtggggtctttcatcatcatggcagcaagcaagacctcgcagtagcctgcctgctcatccgtgaaatgagggccgaccccgtgcctctgggggcggagtgtgagaaaagcaccttggcgtgctcggtctgcacagggcctgactcatagcacgccgcgccgcaagcgccgntcgctgcagcaaacaataggcattctgaccgaaggccgcctagttggccaccaagctgttttgatgctaaaggtgaagctagcttttgcaatgaagttctcaaatttctaattaaatcttgtttctagaaccaaaaaaaaa

SEQ ID NO: 143 - DNA, 139 bp, Homo sapiens
ccctcccaagcaccctgctccctcccaggtgactctgcctagcacatgcttcagcctccaagtgactccactgaagcccagtgcagctggggtggggagtgtcaataaatgtgagcaagtgtgtgtccaaaaaaaaaaa

SEQ ID NO: 144 - DNA, 488 bp, Homo sapiens
  misc_feature (1)...(488): n = A,T,C or G
gactgagattctgatgtatgtcaggtcccaaagcaaccctagacaaatggaagccctggagagtgtcggccactacaattctttattggaaaacactgccccaccgcatcttgcagtttctgtttaagggatcggcctaaaaatctatgcccacaggaatgatctaagtccaactcaatggactgaacagctaagctgcctttcttggcttcttagaggaatttcaacattctcaacagtacctatggcttcagattcagaacaactctcactctttttggaccaagacaacttctttccactccacacataaccatccttcctgncagcacttngactccgacttgttttaggccatacatctacatttttactattgttttcagccattttaaacaaattctttacaatttccagtgttataaatactgtgttttcagcttttctaagangaaagtntcttntgggcactttctggacggatctaa

SEQ ID NO: 145 - DNA, 500 bp, Homo sapiens
  misc_feature (1)...(500): n = A,T,C or G
actgagtttcaagagtctaaaatcaatggcctanctgaagatttgatatggaattgcaaaacgtancaccagtgaaatccganggatgttttcttctaaaacgaanccagcagacgagcagagtatatactgaaattggagagaatagctccacgcgaagcaaatcattaagcccttcatcctcaggtagagtgaaggaggaggatcttaagctcctgcctcccaagnttgatcggattgagctatgtgcgatngtcagagaagcaggagcagctctactcgggcctcttcaacagantgaaaaagtntatcaacaacctggaaaaaaacacagagatgtgcaangtcatggatccaattgagaaaatggccaatcaccntttactacaccgncagtntttacacacctgagaaantgggaggaanatgnctcagcnatgctgaaagaacctacgcactgngaggccaaccnttgacctgatntttgaagacatggaagt

SEQ ID NO: 146 - DNA, 176 bp, Homo sapiens; identical to SEQ ID NO: 9
  misc_feature (1)...(176): n = A,T,C or G

SEQ ID NO: 147 - DNA, 435 bp, Homo sapiens
  misc_feature (1)...(435): n = A,T,C or G
tgagcacagaagaaaagcgagcnaccaggaaaggccgtcggaaaaaggatgtggncnatgatagtgatganagagtgctcatggagcgacttaagcaactgtctgtnccagccagtgatgaggaanatgaggtgcctgcccccntaccccgaggacggaanaaggccaagggnggaaatgtttttgaagccctgattcaggatgacagtgaggaggaggaanaggaggaagaaanccgtgttctcaancccgccaagccanagaaaantcgcatcaataaagccgnggntgaggaacctcntgggctcaggagtaaaangggaanggaggaaaaatcaaangggaangccaanagtaancctgctgntgcaaacagtgaaggggaaaaggaggaggaggacncagctaangaaaaggaccctcctcaccagggga

SEQ ID NO: 148 - DNA, 284 bp, Homo sapiens
gctcttggggtcataagaagtttcctgaagtcttcattggtcagttttgattggtggaaggaatgaagatcatgcacatcatggccatctggagccaaagggttacagaggggctcactatctccctctggcattctggcctcagtctctcagtgcccgcaattgaaaaatgtctaatattgtcttttaacagaggattgttaacatataaactgtcttctataatataaatgtcttcctagattgtagaaaattattaaaatttaattgtaagtaaaaaaaaa

SEQ ID NO: 149 - DNA, 508 bp, Homo sapiens
aactgaggcaagccgagtgctggttgcttcccgtaattttgcaaatgatgctacatttgagattaagaaatgtgaccttcatcggctagaagagggccccccagtcaccacagtgctcaccagagaggatgggctcaagtactacaggatgatgcagactgtgcgccggatggagctaaaggcggatcagctgtataagcagaaaatcattcgtggtttctgtcacttgtgtgatggtcaggaagcctgctgcgtgggcctggaggctggcataaaccctacggaccacctcatcactgcctatcgagcacatggcttcaccttcactcggggcctgcctgtgcgagcaattcttgcagagctaacagggacgaagaggaggttgtgctaaagggaaaggcgggtcaatgcacatgtacgccaagaacttctatggaggcaacggcatcgttggagctcaggtgcccctgggagcaggaattgccctggcctgcaagtacaatggaaa

SEQ ID NO: 150 - DNA, 514 bp, Homo sapiens
  misc_feature (1)...(514): n = A,T,C or G
ctgaggctgctctttggcgtnttttgcaatcgattagggatcgtttctcagactcaagttagaagtgngagttcagataagtgaggccgacattgctgccttgaagaaggggagaatggatttatcagggagtgaaaaagaagagcttgctaggagtcaaagagaataatanaaagtccagcactagggctccttctcctaccaaacgcaaggaccgatctgatgagaantccaaggatccgatctaangataaaggggccactaaagagtcaagtgagaaggatcgtggcagagataagactcggaagagacncagtgcttcaagcggaagcagcagtaccaggtctaggtccagctcaacctccagntcggggctccagcaccagcacaggctcaagcagtggctccagctcgtcctctgcatccagccgctcaggaagctccaggcacgtcccggagctccagttctagcagctcctccggctccccaagcccttctcggcgcaaggcatg

SEQ ID NO: 151 - DNA, 537 bp, Homo sapiens
  misc_feature (1)...(537): n = A,T,C or G
gaactgaggttgcctatcagagagaanttntagtacnagatncatgagggggnaattgatngaatccagnacgatggatccgngntcancttggagtccatgcttcntnccanacacgactgccataaaaccttctntactcgngncacnggtttcangaccttgngnganttgacatncaatgacntgcttttacttcgncttanaactggaatgacactttctgggaatnatacaagtttggctccatcacgtanaantttatattgacagattcgaagatttgcagaagtcgngctgtgacccatttancatacacaagnaagctagccatanacaacctgcacgnnattgacttanatgatgccacttttctgagcgccaagtttggaagacagcttgtacctggttggaagctttgccccaaatgtacccagatcatcaatggaagtgtggacgntgattcagatgaccgccagagacggaaacccgactcanatgtatgtatagaggcccnttgtgctttctacagagaaa

SEQ ID NO: 152 - DNA, 437 bp, Homo sapiens
  misc_feature (1)...(437): n = A,T,C or G
gactgagatgcaaattccatccactcctttccacttaaagatattctcctgggagatcgagaaatttcagctggaatttcatcttatcagttactgaattatgaagatgagtcagatgtttccctctatggaaggcgaagcaaccatattgtgaatgacgtggggattaatgtcactggatctgattccatcgcagtcaaagcttcatttggtgtcgtgaccaaacatgaggtggaagtttcgacattactcaaggagattactgcacgaaaaattaactttgaccacagtttgatccgccaatcaaggagcangcaggaaggcggtgctgtgccgtggtcatgggagagcatccgaaccacaccgccagtgctctctgtcgntgcacgctgggattcgtggggaaccccttgcnggnttcattttatggatgaaca

SEQ ID NO: 153 - DNA, 495 bp, Homo sapiens
  misc_feature (1)...(495): n = A,T,C or G
actgaggcagcccggaggcccgggctccgcccctaacgtgacacagatctgacgcatgcgcagcggcgcgcgctgtttccggnagtgtcctgtgctgtttnagtggcggcctccgacatccccacgctgcttttgctgcaggaactctgcagcgtggaccggcgtcagcctgggcggggccaaggttccngtctggcgccgcaggatggagataatccggagcaattntaagactaatcttcacaaagngtaccaagccatanaggaggctgacttcttcgccatnnatggggggttttcaggattcangaatggaccctcagtaacatgcattaacaagtggtntttgacaccccanaagagagatatcagaagcttaaaaagcatttccatggactttttgctggtctcantctggcctttgtgcttttaagtatgaccacacanatnccnagcatggtaacgaagtcatttaacttctatgttttccccaag

SEQ ID NO: 154 - DNA, 539 bp, Homo sapiens
gactgaggtggggtctttccggccgacggcggccccgcagagcccaagatcatgaaggtcacggtgaagacgcctaaagagaaggaggagtttgccgtgcccgagaacagctcggtccagcagttcaaagaggaaatctctaaacgtttcaaatctcatattgaccaacttgtgttgatatttgctggaaaaattttaaaagatcaagatactctgagtcagcatgggattcatgatggacttacggttcaccttgtcatcaaaacacagaacaggccgcaagataattcagctcagcaaacaaatgcccctggaagcactgtgaccagctcaccagctcccgatagcaacccccacgtctggttctgctgctaacagctcctttggcgtaggcggacttggaggacttgcaggtcttagcagcttgggtttaaacaccaccaacttctctgaactccagagccaaatgcagcggcaacttttgtctaaccctgaaatgatggtccagatcatggaaaatccctttgtcccagagcatg

SEQ ID NO: 155 - DNA, 516 bp, Homo sapiens
tccctaaggaggaggcgctcaggcggaggcctcttgtcagcagaaccagagatggcatcagtagatttcaagacctatgtggaccaggcctgcagagctgcagaggaatttgtcaatgtctattacaccgactatggataagcggcgtcggctgctgtcccgcctgtacatgggcacagccactttagtatggaatggaaatgctgtttcaggacaagaatccttgagtgagttttttgagatgttgccttccagtgagttccaaatcagcgtggtagactgccagcctgtccatgatgacgctacaccaagccagaccaccgtgcttgtggtcatctgtggaacagtgaagtttgaaggcaacaaacagcgggacttcaaccagaacttcatcttgactgctcaggcgtcacccagtaacacggtgtggaagatagcaagtgactgcttccggttccaggactgggccagctagtgggggtgaccgaggcatcttaacttaagcccagctctgca

SEQ ID NO: 156 - DNA, 270 bp, Homo sapiens
  misc_feature (1)...(270): n = A,T,C or G
aaggccaggttggctacgcacccctatggcaaagggnggaacctgatgcanaacatcatggacaacatgcctatctacatgtactcggngtgcaacgnggtatccggcagaccaggacaactggntccgcaccaactgggtgtaccgggaggaggccnagccgcatctttattgagctcaagttcacggtgcganantgtaacagcttcccggggggggccagntcctgcaaanagaccttaaacctctactatggaggagtcagatgtg

SEQ ID NO: 157 - DNA, 243 bp, Homo sapiens
  misc_feature (1)...(243): n = A,T,C or G
cagagctgactgctctgangacaggagctnngcctgattncacnntccattgtctgatgtntcaganantatnccagcgcccggagatgtancggtcctgcnctctgtgcnttnttatanaagaaagacgancttattctttcctgnaggctgaacantaccgcgtgaggatccattttcagganntccgggaaagagacgaacttgnacacanacttatgnccgatcactttcttgatgatg

SEQ ID NO: 158 - DNA, 473 bp, Homo sapiens
  misc_feature (1)...(473): n = A,T,C or G
gctaggatcccacacagactggctcacattaaatgtangaggacngatacttcacaacaacaaggagcactttagtgantaaagagcctgacagtatgctggcgcacatgttcaaggacaaaggtgtntggggaaataagcaagatcatagaggagcattcttaattgaccgaagtcctgagtactttgaacctattttgaactacttacgtcatggacagctcattgtaaatgatggcattaacttattgggtaagtatttcacaggcatgggagtactgtaagtatggcagtgtaggtatcaggatggataggtagtctttctggctgagtatctttgcttatatgtttctttagcccacaaattttttatttggattctaagnagatttaagttctatcacaggggactttnataggttggtattgtttctttggattaaatgactggttcttcactttaaaaaaaaaaa

SEQ ID NO: 159 - DNA, 370 bp, Homo sapiens
  misc_feature (1)...(370): n = A,T,C or G
aggaacaccgcatcccttgggaactgacgntataggaaactgtgaacacctgcagtgagggctgagaaccaaactggngctcnctagaaaagcagccaagtgagagtaatgaccaagcattctctccagcctggtacttgcttttaaatggaggtaacttttgnntccgtgtggctccttactatttagaacttaancaaagaaggcacagaatctcacaaaatatttattgatttggtcttggctcatttttttttaagccaaaaatcagattttataaacatggaaaatatattcaaaatgttttccactaacatggaagatgggaaccattgctttaataaataagtgtaacactagaaaaaaaaaa

SEQ ID NO: 160 - DNA, 508 bp, Homo sapiens
  misc_feature (1)...(508): n = A,T,C or G
ctccgtacctgcctctggattncccaggcactgaccactttgtcatcattgctcagctgaaggaagaggtggccactctgaagaagatgctgcatcagaaggatcaaatgatcctagagaaagagaagaagntctcgncnntagacccgtttgcnngtcagagcctnncagtntgagacncctggccnaatggngcnngatgntnactnnctgttaggagnttnccatngcactgaangcnaaataccnctngcttcnnaaacaggcagctgccttgtccaagagcaagaagtctgagaagtcaggcaccataacgtctccgtgaagacgtgaggaggctcccagcaccaagcccgtgctcccggntcagggctgctgagctggctggtctctgggaagtgtgcttcctacaaaatctctatattttcttaccttaccctctttgntcggatgcaggggctgaaaggaactcctggtctgngccctgntntggctgcatgctgagcgg

SEQ ID NO: 161 - DNA, 341 bp, Homo sapiens
  misc_feature (1)...(341): n = A,T,C or G
gactgagcggccttttnagagagtatgaagagagtgcgtctgtagggcagggaagatggcggacaagcgcaaactccaaggtgagattgatcgctgcctcaagaaggtgtcccgaaggggtggagcagtttgaagatatttggcaaaagctccacaatgcagccaacgcgaaccagaaagaaaagtatgaggctgacctaaagaaggagattaagaagctacaacggctgagggaccagatcaagacatgggtagcatcaaatgagatcaaggacaaaaggcagcttattgaaaaccgcaagctcattgagacgcaaatggaacggtttcaaaaaaaaaaa

SEQ ID NO: 162 - DNA, 528 bp, Homo sapiens
  misc_feature (1)...(528): n = A,T,C or G
tgagataccatgatggccccctttgcatctctggcatctggcatcctcttgttgctatcactgatagcttccagtaaggcctgtagctgtgccccaccccacccacagacagccttctgcaactcggacctggtcataagggctaaattcatgggttccccagaaatcaacgagaccaccttatnccagcgttataagatcaagacgactaagatgctaanaggattcaaggctgngggaaatgccgcagatatccggnacgcctacaccccagtcatggaaagcctntgtggatatgcccacaagtcccagaaccgcagagaagagtttctcatcacggngccgcctaaggaacggaaatttgcacatcagtgcctgcagcttcttggttccctggcgtactntgagccctggctcaagnaaagaagctttctcaaagacctatagtgctnggctgtggngtgggcacagtgtttccctgtttatctatcccttgcaaacnggnagaagngacactcactgtttttg

SEQ ID NO: 163 - DNA, 181 bp, Homo sapiens
  misc_feature (1)...(181): n = A,T,C or G
cacacccagtcctgtggacccagacaccgnngaggtgctantgacctttgaacctgatcccgatgatctcgccctgtcaagcattccaggccatgagacttttgaccctcggagacaccgcttctcagaggaggaactgattgcctcaaccaatcatagantaaggcaaggaatgtccagg

SEQ ID NO: 164 - DNA, 530 bp, Homo sapiens
  misc_feature (1)...(530): n = A,T,C or G
gactgagttccggttcctagcaaatttactagncgagtatcaggctgggnanntangttangccctgctgntnaagannnngatnacgatccgagggtggtatcntgcccatactgnatganctaagntgccgagatncaccaactatgtatanatattnanncntatatatactcatagacacacaccacncnctctcnacanctnnntnccatgttnganntgntgtgncgtttnnnccgngcgtgtnattgaccanggcgacgacggggaccncttttatgtcatagaacggggaacctatgacnttttagtaacgaaagataatcaancacgttctgttggtcagtatcgacaaccgtggcagntttggagaactagctctgatgtacaataccccgagagctgctaccatcatcgccacctcaganggctccctttggggattggaccgggtgacttttanaacantcatagtgaaaaacaatgcaagaagaggaagatgnttngaatcatttattgaggtctgg

SEQ ID NO: 165 - DNA, 437 bp, Homo sapiens
  misc_feature (1)...(437): n = A,T,C or G
ccagatggagacgtgagcccttggtgctacgtggccgagcatgaggacggagtctactggaagtactgtgaaattcctgcctgccagatgcctggaaaccttggntgntacaaggatcatggaaacccacctcctctcacgggcaccagtaaaacctctaacaagctcaccatacaaacctgtatcagcttctggcggagtcanagattcaagtttgctgggatggagtcaggctatgcctgcttctgtgggaacaatcctgactactggaagcacggngaggcggccagcaccgagtgcaatagtgtctgcttcggggaccacacgcagccctgcggtggggacggnaggattatcctctttgacagttcctgctctgnttaagatactgtctgnactnccttcaaaaatgaacggnnatatggaactgtaaacca

SEQ ID NO: 166 - DNA, 450 bp, Homo sapiens
  misc_feature (1)...(450): n = A,T,C or G
gactgaggacggagatgctatgnttggaggtatgcttgngtggcccccaccggtgntcntnaccaagcttaangntgacngtctangcaccggaggntnacancnngttnnntcagacanctcncgtgatagnccagaaggcnccagactctnattctgatgtactggaanttnagganatcctgatgaagtcatctttagctcactnaggaagcgctaaatcangattgctcncntantatttgtagaantgtgcntgtncttaaangnnaggggctttttgacatgaactggagaantgtaatggaaagtnctctagaagaggnactccacgcgaagtttactttcnacctnaaggtctccattntcctggacttaaccagaggctcaagaggtaggaagaactctcgcactatnctgctcccactcctgaagaggtttccagagcgc

SEQ ID NO: 167 - DNA, 121 bp, Homo sapiens
  misc_feature (1)...(121): n = A,T,C or G
ctagcgccaattacatcaagaagatattncacagcgngggtatcgaggcggacgangaccggctcancaaggttatcanngagctgaatggaaaaaacattgaagacgtcattgcccaggg

SEQ ID NO: 168 - DNA, 528 bp, Homo sapiens
  misc_feature (1)...(528): n = A,T,C or G
ctgagctccagcccaggcccagtntgtgcatgcggggcaggcctgtgtggtgaaggaggataacatcagcgagcgggtctacaccatccgggagagcgacaccctggtgctgcagtgcctggtcacgggacaccctcggccccaggtgcggtggaccaaaactgccggcagcgcatcggacaagttccaggagacgtcggtcttcaatgagactctgcggatcgagcgcatcgcacgcacgcagggaggtcgctactactgcaaggcggagaacggagtgggcgtgccggccatcaagtctatccgcgtggacgtgcagtgtgagttatggtctctcgaggttctggaccctgacgggacgggcccttccagggctccggacccctcagggatgagaaagggagataggatggagcagtggcaaggtagtgaagggctggaaagacctctctggaaatggtcagctgtgtgttgcccttccgccctgtatctccctaaaccatttctgcattttccatgtcctctcga

SEQ ID NO: 169 - DNA, 373 bp, Homo sapiens
  misc_feature (1)...(373): n = A,T,C or G
gtgaggtgtgaatgaggcaggatgaactggacaggtctatacaccttgctcagtggcgtgaatcggcactctacagccattggccgagtatggctgtctgtcatcttcatcttcagaatcatggtgctggtggtggctgctgagagcgtgtggggggatgagaagtcctctttcatctgtaacaccctccagccgggctgcaacagcgtctgctatgaccattttttncccatctcccacgtgcgcctatggtccctgcagcttatcttggtttccaccccagctctcctcgtggcaatgcacngtagctnaccaacagnacatagaaaagaaaatgctncggcttgaggggcatggggacccccttcacctg

SEQ ID NO: 170 - DNA, 426 bp, Homo sapiens
  misc_feature (1)...(426): n = A,T,C or G
actggaagactcagtcctaggcccgtggggaaagtggcattgtttctgcagcctgggcagacaggaacgcagccgtcaggtgttgggcacggcaccagtccctgtgttcatggaccgagagaagctggtacagatgaggccgtgccggcaacaggattgctcatcttgcagcctgaaggactgcaactagaggccctgagcagaggtgancaacanacgggncatggnaatgctagncagaactggctgacagatctagngcaggnacttaacatgagggcgcggccctttaatcccagcacttgggaggcagagacagncagatctctggggttcnagggccgcttgatctacanaatgagttcccagaagntccaggagcggccnaggattnacagataaaccctgtcttgaaaaataaaaaca

SEQ ID NO: 171 - DNA, 186 bp, Homo sapiens
  misc_feature (1)...(186): n = A,T,C or G
ctcacgctcctcaagctcctctcccgcaaaggcccccagcctccgtgcaagcattcttaaactctttacgcctaacngaacaagcacagttttttcaacggtgaagaaaaagcaccagacttgttttcctgaagaaatcccccaagccgccaaccccgtctgtgggacaaacattccccagcgtgg

SEQ ID NO: 172 - DNA, 185 bp, Homo sapiens
tgaggtgaccccatctctggtgttcgccgtgactgttgccacgatcggctctttccagtttggctacaacactggagtcatcaatgtgccgagtatggcaggtaactattggtacccgctaaaagttttatgacaaagtcttagaaataaactggctttctgaaactggcttctaaaaaaaaaaa

SEQ ID NO: 173 - DNA, 486 bp, Homo sapiens
cggactctgggtatttttccgtgctgctggatgtgaagcacttcttgccagaggaaatctctgtcaaggtggttgacgaccatgtggaggtccatgctcggcacgaggagcgcccggatgaacacggattcattgctcgagagttccaccgccgataccgcctgcctcctggtgtggaccctgctgctgtgacctcagcactgtctcctgagggtgtcctgtccatccaggccacaccagcgtcggcccaggcccaacttccgtcaccacctgctgccaagtaggggtcccagctgcacaggaccgaacccaggaagcctctttaggctctcttttaaaagccgatctgactccactgcccagccagatgtcccaattcgccgtcaagacagcctttcccaaccacacctagatgtccttcggagacctttccacccctaagcctacctgagccctagtaacctagacagcctccctaagccctct

SEQ ID NO: 174 - DNA, 255 bp, Homo sapiens
tgaggatccggaaagggggagtggcttccggcatgaagcacgtagaaacaaactcctgtgatgtccagcgactgttgcacgtcaagggcaagaggaatgtgctggctggagaggtggaaatgtcctggaagagtttcaacagaggggatgtcttcctgctggaccttgggaagcttattatccagtggaatgggccagagagtaaccgcatggagagacttcgggtaaccccatcagggcacctcatttctgcaa

SEQ ID NO: 175 - DNA, 541 bp, Homo sapiens
  misc_feature (1)...(541): n = A,T,C or G
actgagtgaaaggtaaagagcaagagaagaccttagatgtcaagtccactaaagcttcagtagccgnacattccccacaaaaaagcactaaaaatcatgccttgctggaggctgcaggaccaagtcatgtngcgatcaatgccatttctgccaacatggactccttttcaagnagcaggacagcaacgcttaagaaacagccaagccacatggaggctgntcattttggagacctaggcagatcctgtctggactatcagactcaagagaccaaatccagnctttcaaagacccttgaacaagtcttgcgtgacactgttgtccttccatatttccttcagtttatggaacttcggagaatggagcacctggtgaaattttggttagaggctgaaagntttcactctacaacgtggtcccgaataagagcacacagtctaaacacagtgaaacagagttcactggctgagcctgtctctccatctaaaagacatgagactccagcatcttctgtaactgaggctnttgacaggaggttggg

SEQ ID NO: 176 - DNA, 550 bp, Homo sapiens
  misc_feature (1)...(550): n = A,T,C or G
acgaggaggaagagatanngaccaggactctgctgaggaaggcactgcngnaaagnncnnganaccgaggncgacncangancgntngcaggcttgagantggggnancctcctgcaggacattcgacctccatgcttgataagtattggcctcttcttgaccgggctcntgcttcccaagtgtgccgnaatnggaatcagnagcancagaancnnatgaagctgctngtgacatactgtnancnacttgagaatgtgctctttagaaacgctggganttatctcgnctgcccggccaagctttatggatntaccaaagtcttnccnataaaatatttctactagaactaccatttgctaagtgatgagttgttagctcgcactgtcttctgaaaagcatgttccgcttagaacattttgcgcattgatgttgtcagngagaaccccgggnacaagacacactttccacactatncagaagagcagctgggatgcctttaatnaaaacacttnacccaaaaagtcaacctaagtgatgtattttttattt

SEQ ID NO: 177 - DNA, 222 bp, Homo sapiens
  misc_feature (1)...(222): n = A,T,C or G
gactgagtttatgcaggctcttggngaagctggtgctgctgctgctgtgtgattaccgcggacagaccttgngaccgaggccngcgctggcagctgganatggcggacacaccgtcagtgtatgaaaccagatttgaggcggccgtnaangtgatncagagtttgccgaanaatggtatgtgcagtgggctctaggtaaaagaccttttccagctaaaaaaa

SEQ ID NO: 178 - DNA, 483 bp, Homo sapiens
  misc_feature (1)...(483): n = A,T,C or G
cggctcactttcttcctntggccatcaanctanggaggtcctgnnggcnagcnatngnncatgacatatgctnncncgntngngntttngantgnncgngtntggtacttgaactnganannttccngcctctncaatgttaanaganccaccatcccngaaacattaggtnccttgatgatactccatcctgtatttgttttgaaantgtacactggtgtgagatcccttggaactggagttacagacaattgtgagctaccatgtgggtgctgggaattgaacccaggtcctgtggaagagtagacngtgctcttaaccactgagccatcgctcnggcaccttgtgtgctggtcttaaacttgaacaggctgccttggaaactcgcgatgctatggtctggggttaaaggtatatgcctcagcctactctctgaatttttatttttactttatttgggttctcttttgtagttctgtctcc

SEQ ID NO: 179 - DNA, 414 bp, Homo sapiens
aactgaggtgagaggcggtggccgaagcccgagcccttgcgggagggcggattggagcggcgctgagcacggcgggcacaggcccggatgatgaggtacaccacctccgccacgttgaggataatgcagatgccggaggctgcgagcataaagacagtgaagacggttttctcggtggggcggggacaccgaagcagtccactgtgttggggcaggggaaggcttcacacttgaccagccgcaccatggcatagccggggtagagcagatagaagacatacatgaagacagcctcgaacagcagccggaacaccacactgatgacataggtccaccacagtgtccctgagatgtgcaccttgtgtctctttacctcttccaggtgaagggggtccccatgcccctcaagccgta

SEQ ID NO: 180 - DNA, 479 bp, Homo sapiens
  misc_feature (1)...(479): n = A,T,C or G
actgagggccgtccggcgcgccaccactctgcccaggtctccaactaggggagcggagaattttcaccaacggagccgaacgctgacgactaccgggaacaagcgaaaccggcacgctcatcctcccgcattagttcccagtagggaactattttccggtacactctaggcggtccaactcttttcanaagagcttccggtttccacccacctacttccgctgtccccacctcttttcttccggcacccggatatgagccgttctcgcgagaaccgtccctctttctaagccggcgatccgtcagggtgaagccatgttcagctccgagcgccaagatcgtgaagcccaatggcgagaagccnggacgagttcgagtctggcatctctnaggcgctgctcgagctggagatgaactccgatctcaaggcgcagctgcgtgaactcaacatcaccgcanccaagggaaatcgaagtttgg

SEQ ID NO: 181 - DNA, 293 bp, Homo sapiens
  misc_feature (1)...(293): n = A,T,C or G
gaactgaggagttcccttccccaagaacttccagcaggtctgcaccaagatcctgacccgactcttccgagtctttgtccatgtctacatccaccactttgacagcatcctcagcatgggggcggaggcacatgtcaacacctgctataagcacttttactacttcatccaggagttcagcctggtggaccagagggaactggagccactgagggagatgacagaanggatctnnnactgagngcngatctngatgctggtgcctgtcanatggaccatctgcagacagtgta

SEQ ID NO: 182 - DNA, 226 bp, Homo sapiens
  misc_feature (1)...(226): n = A,T,C or G
gactgaggcatcagtttcaaactggaagaaaaaacggcccacagcagcctggcactcttcagaggcgacacgggtgtcaaananggnatngnanngactggancccaccnctgtggccctgaatttggagcgcttccgggagtgggcagtggtgctctggagacaccacantnaccagtggcagacactacttgggaggtaacatgtgaagcccatcccagcattt

SEQ ID NO: 183 - DNA, 234 bp, Homo sapiens
  misc_feature (1)...(234): n = A,T,C or G
aactgaggtgcagtgagcctgccactcgccctcactcgtggcataccaccaaatttggggagacacagcctgatgtcagcatgatgcagatatctcagggcacaatgggccctccntggcaccagagctaccattccagctcttcgaccagtgacctctccaactacgaccatgcttatctgaggcggagccctgaccagtgcagctcccaggggagcatggaaagaaaaaaaa

SEQ ID NO: 184 - DNA, 275 bp, Homo sapiens
  misc_feature (1)...(275): n = A,T,C or G
gatcaacaagaaatgttatgaaatggcctctcacctgcggcgttcccagtactgacctcatctgtcccttccccccaccgttccctttggcttttgcacccccttctttccatacacacacataccattattttttgggccattaccccatttcccttattgctgccaaaaccacatgggctgggggctggggctggatggacagacacctccccctacccataccccctcctgtgtgtgtttggaaaatttttgnttttgggtttcattttttg

SEQ ID NO: 185 - DNA, 235 bp, Homo sapiens
  misc_feature (1)...(235): n = A,T,C or G
gaactgaggaccctgcaggaatctttgagctggtggaggtggttggcaatggaacctatggacaggtatacaaggggcggcacgtcacgactggncanctggctgccattnnngtcatggatgtcacagangatgaggaggaagagatcacncnggnaancaccatgttnaagangnactctnaccatcgncantattagccacctactatggngcctttatctagacgagccct

SEQ ID NO: 186 - DNA, 514 bp, Homo sapiens
aactgagtgatcagagccaaagcagtgagcgagaggaggtggattccgggaatgacatctatggcaaccccatcaagaggattcagtatgagatcaagcagataaagatgttcaaaggacctgacaaagacatcgagtttatctacacggccccctcttcagcagtgtgcggggtctcgctggacgttggaggaaagaaggagtatctaattgcaggaaaggcagaaggagatggcaagatgcacattaccctctgtgacttcattgtgccctgggacacgcttagcatcacccagaagaagagcctgaaccacaggtaccagatgggctgtgagtgcaagatcactcgctgtcccatgatcccttgctacatctcctccccggatgagtgcctctggatggactgggtcacagagaagagcatcaatgggcaccaggccaagttcttcgcctgcatcaagagaagtgatggttcttgcgcgtggtaccgcggggcggcaccccccaagcaaga

SEQ ID NO: 187 - DNA, 502 bp, Homo sapiens
  misc_feature (1)...(502): n = A,T,C or G
ctgagcctttctgaagggcgctgagtgacaagcagagagaggaacattacttctgcaaggatttcattaagctgaagaagatccccacgtggaaggagacagcaaaagggctggctgtgaaggtggaggaccccaagtataagaaggacaagcaacttgaatgatgaaaatctccctgtaccgtggggacatcaccaagctggaggtggatgccattgtcaacgctgccaacannttcctggngggaggcggaggggtaggacggctgnattcatcaggnccgcgggatccctgctcacggacgaatgcccgcaccctacagaaactgcnaagacccggcaaagtccaagatcactttgcgggctattcggcttgncagngcaagtntgtnattccnncacgggtggggngcccatccgccgtngggcccaacccnctngnncaagncaagggcnggncagagctncccgnagcttgcttactttgaggcaagcgcttggac

SEQ ID NO: 188 - DNA, 479 bp, Homo sapiens
  misc_feature (1)...(479): n = A,T,C or G
gaactgaggagtctcnatttatggatcgtaagctgngnaannncacatgnataacatcccntcagtacagtggacagggactgctnnnaagccacanctaccnataaggnngcatatngctaccgagccntagnagttctccggtagctttgtganaggcacatgaagcatcttcatctgtgggcggaggagtaggagtgatctacagagtgaanaaagtcactcggtgctaggcgctggnaagtngggnngtggaaaggctctgggtcacagcacgtgcatcctgggcactggaggcagctgtgcttcatgtggtatcccagcctttcaagtgtgacagaagcctcatgacaagaggtgccacagctgactgctaagcccagaggctgagaaactatgcttcctaaaacccagagctcatgcgaggaattnantttccacctcacagaaaacaagtataaatagtggcacaactactg

SEQ ID NO: 189 - DNA, 405 bp, Homo sapiens
  misc_feature (1)...(405): n = A,T,C or G
gaactgaggcggattcgaaagcttcagcagctcccctatggcggagcaggcggctacacgcagtcccccggtggcttcgggtcgcccacaccgtcgcaggcggagaagaaatcgagagtccgagcccagcatattgtgccctgtaccatatcccagctgctttctgctactctgactgatgaagtgttcagaattggagatgtcgagatttcacaggtcactattgtggggataatcagacntgcggagaaggctccaaccaacattgtttacaagatagacgatatgacagctccgcccatggatgttcgtcagngggttgacacggatgatgccagtggtgagaacgccgtggttcctcccgaaacatacgtgaaagtcgctggtcacctcaggtctttccag

SEQ ID NO: 190 - DNA, 411 bp, Homo sapiens
  misc_feature (1)...(411): n = A,T,C or G
tctaatgatgatgctcttcagtatgtntgaagaattaattttgcnnttactanntatgctatgccaagctcagccccggagtgcttcagatgtggaggaacgngntcanannagttttcctcatccaattgatnagggggcaatagctgatgcccaatcagccnttgaaaagaggaagagacanaaatcctttatcgctgccagcngaaagaattcatcatttattaagggaggtcctcggttataaaattgaccaccaggnttctgnttacatagtagcagtattagaatacatttctgcagatattttaaagctcgtggggaattatgtaagaaatatacggcattatgaaattacaaaacaagacattaaagtggcaatggngtgctgataagggattgatggatatg

SEQ ID NO: 191 - DNA, 396 bp, Homo sapiens
  misc_feature (1)...(396): n = A,T,C or G
catcttggcacacagcaatcttaancccactgaatggatgggaacagctggcanagcgtttctaggacctccacctntgntnggcancccctcctttgtgcctctctccaagttcatgaacacccangtattttggaactattggttngggaacgcctcctcagaatttcaccgngagtctttgacacgggttcttccaacttgtgggttctgtccagggggnggacntttcttcagtttggcatgctggtttcaccatccgctttaatcccaaggccnccaacntcttnaggcccaatggggaccaagtttgccattcagtatgggaccngggcggntngaagcggaatcctgancccagggcaatcttgactatcgggagggagtccacagatg

SEQ ID NO: 192 - DNA, 509 bp, Homo sapiens
  misc_feature (1)...(509): n = A,T,C or G
cattagcagaggggactncatgtatntctgtnataccngcccgtcanacatgagaatgacngctggtggnnctcaaagncagacacttgncnaagatggatatcacnaggtctntcaggtnntccttatntcaaggagaacgtctactactggcagaaaactgcattgccaagaagaaaacccatgtaaagaagtgcactttgaaccccgtcttcaatgagntgttcatgggnggaggtccccaccgaccttctgcctgatatcagcatcgagttccttgtcattgacttcgatcgcactactaagaatgaggtggtagggaggctgatcttgggggcacacagtgtcacaaccagtggtgcggaacacttggagagaggtctgcgagagtcccccgcaagcccatagccaagnggcacagnctgagcgagtactaaccctggggccaggnggggaggcncatggnggggagaggtgacaganaanctgactnaaaacctatgcctgac

SEQ ID NO: 193 - DNA, 504 bp, Homo sapiens
  misc_feature (1)...(504): n = A,T,C or G
actgagctgtttgaagccctatgcaaagctcacgggtaatgacccacttggagaatgggaaagctttataaagtgggtagaagagaattttcctgacaataaagaatacttgatgacattatnaaaaacattnanngaggggnntttttacctaagaagaactaccacaatgattcaagattcatcaattattgcttaaaatttgctgagtacaacagcgaccgtcatcagtttttngagtttctgtacaaccagggaattggaaccaagtcatcatatatatacatgtcctgggcagggcatctggaagcccagggagagctgcagcatgccagtgctatttttcagacaggaattcacaatggaggctgaacctanagaactactacagcaacaatacaggctattccaagcacgccttactgggaatccatttgccagctcaagctacaaccctcagaacctttgcatagtgcacagattttaaaccaaggttatgatgac

SEQ ID NO: 194 - DNA, 307 bp, Homo sapiens
  misc_feature (1)...(307): n = A,T,C or G
gactgaggaagttctccagcagctgatcgtaatgaatttgcccaatgtcttnatgatnggaaagacccgntnnctgggaagagnanggaggncattacaananctntgntgttcangcntcctntgccacctccggggacggactctatgaggggctcacatggttaacctctaactacaaatcctaatgagcgtcctccacccagcccccggaaggagagaaatncanaacccangggggaggattatcgccacctccatcacctctttgaattgccactctcttttttgaatctgaactctggag

SEQ ID NO: 195 - DNA, 222 bp, Homo sapiens
agcacatagccacagcactgaacctgacagaggtccagggcccaccctcatgtgccagagtaggtcaatgctcccctgcagccttgctacgtcctaagaattttccagttcctgatgtgactccagactacatctctacatttaggaccagcagcctgcagtaacagtgggacagcaggccttggcaacagatgttttccgattttctgaacctactggccc

SEQ ID NO: 196 - DNA, 298 bp, Homo sapiens
  misc_feature (1)...(298): n = A,T,C or G
aattattgttgaggcggtccaggacctnacgcagctttgttgnntagaccggnggccanaacctggctgtacttcccatccttcacatccttctgtctgtncaagaaccagtctgggatcttgtactgtcgtgggttctgcatgatggtgatcactcgctccacctcatccttgcgtgagttctccagccctcttggtgaggtcgatgtctgctttcctcaacaccacatgagcatatntccgccccacgcccttaatggcagngatggngaaggctattttccgccgcccatcgatg

SEQ ID NO: 197 - DNA, 394 bp, Homo sapiens
  misc_feature (1)...(394): n = A,T,C or G
gaactgagggctgtctctagacctgggggacgcaccccagttccaacacctgctgtcctgggtggatgatgaaccagtctcagagaatggcacccgtgggctctgacaaggaactgagtgacctcctggacttcagcatgatgttcccagtnnccaagcncaaangttaacttcctctccngttaacccagaactgggaaacaaagcagcatgctcccttttcaaaaaggaaagaatnntttnttangnntgtaagacggaagagncggaccgtgccctggcagggcggcctgggactggcttctacttcagagccaccagcacatngtgcctaagcatttttcgttttttttaaaggagaataanggaacattagntttcagaaaaagaaaaa

SEQ ID NO: 198 - DNA, 134 bp, Homo sapiens
aactgaggactggtggaacgaggtggtgtcatgattgagccgctccccaaggaagtgaaggtttatctcctgactacatccagtgccccgtactgtgtgcaccacagccttgtggagttttatttgaaggagaa

SEQ ID NO: 199 - DNA, 480 bp, Homo sapiens
  misc_feature (1)...(480): n = A,T,C or G
gctgcgtccggctgaggtctggacatccaggcangctctgccggacttgtnccagaaaatgctagttactganctggaatacgctttagacaagaaagtagancaggatctctggaatcatgcctttangaatcagatcacaacactgcaaggccaagccaagaatctgagcaaacccanatcagaattnnagtccaggcaaacctttctctgttcctagaggcagntagcggcttctatactcagnnacatcctggtgngatctacaaattgaatcccgngntcatggaactttttantagcntgatatcttggnacaaattggctatttcaggcttggagagaanggcttaacnttnnagagcactanaactctatatagcaactctcaaagggcctatanntcccccttcccagagaatntgatgcnctngttactgactaacannggggcttgncacaccacttgggagttggtgt

SEQ ID NO: 200 - DNA, 433 bp, Homo sapiens
  misc_feature (1)...(433): n = A,T,C or G
aactgagatttgagaaaaatgggtagtgatgttggaaaacagagatcagatccagaagaaaccctcgccctggagattagacatngacttcgcagcagcagaacaaggaaccgggacacagagctggttcccaggttcatcggtcccctgacccggaacagcagcgggtttctgcactacgctggcagcccacgtgctagcaacagcggccacgtggggccttgaggaaacnccttcgcaaaggtttctgtttggagacaggcccttttggtgggtgcatgaatctgggtactccacccanactccaatccagattcaccanttcccttcttcttgagagactggtccaggcagcccctccggccactgcatgatcacaggcgcagctctttggcctgnaatgacngccatttcttctcaggtggcttctcgg

SEQ ID NO: 201 - DNA, 412 bp, Homo sapiens
  misc_feature (1)...(412): n = A,T,C or G
gaactgagcgtggacaacaatagagaactacaactcccaaaaaagactgcgctcgccactggctcagaaaccaatggccgnctggcacgngatcggttggtctaatcagcgactggttgggtaggctttgtctaagacccggggcgcccgcctatctcccgcccccggccgcgcgaacgcgagccccgccctgcgcgccttccctcctgcgctcgccggcctctcctgcctcttagaaccttcctgcggtcgtgcttgcatctcgctgctgcagcctcccgggctccggtccatcctttcagtctgagaccggcccagaagaaaaaaaccccaaaaaccttaattttntttnttggtcggtacctacattggaaccatcaaaaacaattatttcagtaaaccgtagccatga

SEQ ID NO: 202 - DNA, 335 bp, Homo sapiens
  misc_feature (1)...(335): n = A,T,C or G
agacagacggttggaaaaaaactgaagatcacacaaaaagagagcaggaaatccaaatctcccccccttcccactgtgattgncatgttgacaagggctgtcccaagtcaatagaaagggaaagggtggggactaggggaggattaggggagcctaccaaggactcanagtagaaggtcagacagtgccacttggccacttggggtaaagccagtgccagcaataacagnttatcatgctcattaatttgggatttcaaaccacaaatgagaacttccccacccaccccaagtgcatgtcgccatcacttaaaagttccattgaaaataaaaaaa

SEQ ID NO: 203 - DNA, 178 bp, Homo sapiens
  misc_feature (1)...(178): n = A,T,C or G
gactgagatggactgctgaattatgaagtatttcagacccagtcttagatcatcactccgccactctctcctttattgcctactagatatttaaantggacttttaatatcctaccagctgctnttnngacacnaanggcgcattgntgccanaccanggcaataagcgtttttgaga

SEQ ID NO: 204 - DNA, 384 bp, Homo sapiens
gactgaggtaaaaggatgcccgaaggaagtaaaaaaattaaagaggcctctgaaagccagaacttggagaagaaggatctggaaacaagcagttgtgtcagtataaagaagaagcgtagacttgaggacttactcatagtgatatccgatagcgatggagaggaaacaaaagaggagaatggattgcagaaaacgaagacaaaacagtcgaacagatcaaagtgtttggctaaaagaaaagttgcacacatgtcagaagaagaacaatttgctttggctctcaagatgagtgagcaggaagctagggaggtgaataaccaggaggagaaagaagaggagctcttgcggaaagccattgctgaaagcctgaatgtaaatatgctg

SEQ ID NO: 205 - DNA, 166 bp, Homo sapiens
  misc_feature (1)...(166): n = A,T,C or G
ggaagacatcatgctgtggncattgacctgnnccactgcccggactgngcagctctacacggatcttncttaatgaanaagagganganctggcacaggcatgactacacacnaagtggatgatggctccaaacctgatcaagctggaactagggcctttaaaaaa

SEQ ID NO: 206 - DNA, 244 bp, Homo sapiens
  misc_feature (1)...(244): n = A,T,C or G
ttgacaagaacgtggacagancaganaaatactccaatggcagacatttcacaaggcaatttgctcgacagcaggctgataaaaaagaagagtgcaaagaagacaaagttattccagttattcgctcattgaggaatagaaacattgctccaactgcagaacatttgcacgaacaaagtggagatgttgaagttccgaagaagttgcaggattagaagtcgntacagnaccatgaaccagtttg

SEQ ID NO: 207 - DNA, 496 bp, Homo sapiens
  misc_feature (1)...(496): n = A,T,C or G
ttttctgagacctggcangagctttncttgtagangccggnntnaanctcngcacctgtactccacggcctncntnnnnggnccnnttgtnncanatatggataccgatgccccagaagaggaggaggacgaagctgacatggaagttgccaaaatgcagacccgaaggctgttgttacagtgggctggagcagaccccagcatccagtgttggggaccttgagagctnnttnactgggtccatgatcaatggctggggctcagcctcggaagaggacaacatttccagtgggcgctccagtgtcagttcatccgatggctcctttttcactgacgctgattttgcccaggcagttgctgcagctgcggagtatgcgggcctgaaagtggctcgccgccaaatgcaagatgctgctggccgccgccacttccatgcctctcagtgcccaaggcccacgagtcctgtgtccacagacagcaacattgagtgctgttg

SEQ ID NO: 208 - DNA, 330 bp, Homo sapiens
  misc_feature (1)...(330): n = A,T,C or G
gccaatcaactgaaacatgacacacctgcacagttggaaaatggaggatgaagaaccgattnggngtgtnccaccancatgactggaggtgtctactananagggagcctgctacatttactccnagaaatttgttatanaccaagaatacaattctcaattaagaaagccaccaatttgggtcccnccacatcctgactacctacagtataggnnttctctcttctttcatttcccctgtccccattttntttattgnacataaagtanctgggtgtaatgngcncacttnntagngctctcntctttcttttccttttttaaactaaa

SEQ ID NO: 209 - DNA, 489 bp, Homo sapiens
  misc_feature (1)...(489): n = A,T,C or G
tctccaggacatgctacnccatntggctcagggcgnggtagagaaaaaagaatgncnaatgagttggaaagntatnttaagccttnantgctngnagacccttgggctggcctagaaccagngtctgtagtggatataatgccaacagtncagcaataccgctaccattcacaggcaacaaaaggaagatacttttcttaatatttctgaaattcaccnggaagcttcatgtgtcaggaacatcctggacagaacttttacttgnntaaaaaanntgnacccaaggatgatgactttgaataatgantagcanaccttnggtatatctccanctttatcaagtgtggataacagnggaaatgataggacnatttacagtatttagctatctgggagttgtgtatcatagaancncagntgncatantngacatttccantataacagacattnncttttttcaatgctttaaaataaagacgttttttg

SEQ ID NO: 210 - DNA, 477 bp, Homo sapiens
  misc_feature (1)...(477): n = A,T,C or G
tctgcacattgccaaggagcatgcaggagngctttctccttctatgatggggtactccaccatgagtantggccgccctcctcatacactnacgaagctatcntacttgctcntatncnatataacgtacacagnattanncnacntgctgncgnncagcccttttccccaaatcaaagatatatnaggcattttacctcgagaggtcttctctccctggcaacagcaggataactgagggctttctttaaaagnggatccaggaggatggattatttgcggaacaaaagagattgcactccaatgcacagaagcttcttnagtgcgctgagccctcctgcccaggactggagctccccaaaactggtctcaggcaaacttcctgagctggaccggtttctccagcattttgccatcggcagcattgntcaggagcctgtgatgcgagcccatcttgggggcctgctgcccaagcca

SEQ ID NO: 211 - DNA, 355 bp, Homo sapiens
  misc_feature (1)...(355): n = A,T,C or G
cagcctgcagtcggtggtccggggtgcagaggaagtcaagcaaaagtttcaaagattatnttnnttatatcngaangctggaatcctgcctaatccacaattcancctcaaggcatttttctgcggcatcttttcangaaatgtgattcatangnncaccacagcggaaggaattttgacccagaatgactcggtcactgccgacgggttgcaggaggtgttngaaaccaatctctttggccactttattctgattcgggaactggaaccacttctctgccatgtggataacccctctcagctcatctggacttcctctcgcaatgcaaagaaggctaacttcagcctgggggtc

SEQ ID NO: 212 - DNA, 470 bp, Homo sapiens
  misc_feature (1)...(470): n = A,T,C or G
gactgagatcctggcctgaggttggatgcctcatcttgctaaaaagacactggacctaaatggcgcagcatgactttgttcctgcttggctaaatttctcaacgccacagtcatctaagtcatctacagccacctttgacaaacacggagagcacctatcccgtggagaaggtagatttggaataagccgtcgtcgacataattcctctgatggcttttttaacaatggacctctacggactacgggagattcttggcaccaaccctncctattccgccatgattctgntgactctggtgnctctaagggagcatatgctggaaccacaggttggcatggctcttcccgaggtcatgatggtatgagccaacgtagtggaggnagtagtacaggaaaccaccgacactggaatggcagcttccattcccggaaaggctgngcctttcaagaaaaaacaccaactgagatt

SEQ ID NO: 213 - DNA, 315 bp, Homo sapiens
  misc_feature (1)...(315): n = A,T,C or G
tgacccgtatctggcaccactcagggtctcctatgatgccgcgtcctgcagatacctctggaacactggctacttcttccaggtggagtttgacgattcctgtgaggattcaggactcactgaaaccaactgggagtcactatgagactcaaaactcaaaatgtcctntgcctcagnctcctgagacctgggatggcaggtgtgtgccaccaggcctggctnttgatgcacgatttttctgaagacgtgtntgccaatgnccttacagaaaggtcctgccctgggagaagcagtgnctgtttcaggtgctgtgtc

SEQ ID NO: 214 - DNA, 301 bp, Homo sapiens
  misc_feature (1)...(301): n = A,T,C or G
gggcggacaggaaaacccggacgccgaggacaagangnctccgccntccccacgggacggacggacggacggactccacaagcgtccaccggtcactgccgccgcccacagagacgtcgcccacgagagcacacacgtagacgcggacgccgtgnttttnnagnctnngccatccccacgggacgganggacggacggantnnacaaggngcgcgtgtcaccgaggccgccagganggagccactctcacgattctcaacagggccngaccgngnacagaaatgtccccctcaataaaacc

SEQ ID NO: 215 - DNA, 302 bp, Homo sapiens
  misc_feature (1)...(302): n = A,T,C or G
taaggagctacatggatggacgggtggacagaggacagatgtgcgagccaatggtttggtggagtctcgagcagacacaggaactggtggccaacggggaagcgctgttcctgggccacctccctcactgagattcttctctaagtggaaaaagataagattctcatcttttacacagaagagccacagagaacaaagcaagaaaccagtgtctggagccgagcaggaacaggccaagggcatggntctcctcaaacacacacatttaaatacattcaatctgatggggatgaaaaaaaaaa

SEQ ID NO: 216 - DNA, 179 bp, Homo sapiens
  misc_feature (1)...(179): n = A,T,C or G
cttgccatgaggtgttgaagccttgtttcactgagttggagagactggacctaaatggnnnnnnatgactttgctccagcctggcttaattttcctactcctccatcatcaacaaagtcatcattgaattttgagaancactctgaaaatttttcatggacagaaaatcgttgtgaagg

SEQ ID NO: 217 - DNA, 528 bp, Homo sapiens
  misc_feature (1)...(528): n = A,T,C or G
actgaggctctgtggctacccacccttttatgatgaaaatgatgccaaacagctttgaacagattttgaaggcagagtatgagtttgactctccttattgggacgacatctctgactctgccaaagatttnnannnnnnnantgnagnnnnnagacccggagaagaggtttacctgtgagcaggccttgcagcacccatggattgcaggagatacagctctggataagaatatccaccagtcagtgagcgagcagatcaagaagaactttgccaagagcaagtggaagcaagctttcaatgccactgctgtggttcggcacatgaggaagcttgcagctgggaaccagtcaggaggggcaggggcagactggcagccacggggagctgctgacaccaacagctggtgggccagcagctggctgctgctgccgagaactgctgngnggaaccaggctcngactgncccctgcaccacccccaagcctctagggcccataggaatttgaacatcaaaggaaggtccaggt

SEQ ID NO: 218 - DNA, 331 bp, Homo sapiens
  misc_feature (1)...(331): n = A,T,C or G
actgagaagcgggccctggatgcagccatcatccttgggggtggaggacttctcttcacctcttacctgacagccacgggggacgaccatttctacgccgagnacctgatgccgnntctgnagagactgnttgatccngagtcggcgcaccggntagctgttcgagncatttncctggggctccttcctcaagctacgttacaggactccaacatgctggaagtganagatcnggcncgnagntncagnngtccanacagggantgctgnacganaanncaaggancgancaagctgancaacaggtctctgtaggggagggctctgcgct

SEQ ID NO: 219 - DNA, 499 bp, Homo sapiens
  misc_feature (1)...(499): n = A,T,C or G
tccagcgttcctgttgnagtatcttgttcttcagccatcgacaggacagtaacatctttaggtccactgtggggaatgcaatcatcttggtcaattagttcatctaagtnaagccatcctctggaagttcagatacaagaagaattgagttggaactcaaagactgatccttctgtggcttgattttggaatgaaagaaaattaaaaagaaagaacataagccataagctgaccgataggacttcggacttcttctaaggagattccgactacnatatggagaacgggacctggatctggacctggatctggatctatatttagaaatgaaacggtggcaaattcttggacttcgactccttggtctatagatataacggactggacttcgagagcgacggattctgtgacctgagcttgatctcctagaatgtctggggctgggggaatgagaacgtcttcttggagtttcattttctttcctattgctctcatttcg

SEQ ID NO: 220 - DNA, 469 bp, Homo sapiens
  misc_feature (1)...(469): n = A,T,C or G
tgaggtcccggatgccaggccctgcgggtagagggggtccaccatccctgacggtgaacttgggcgaggaggcccgcctcacctgtgaaaacaatggcaggaaccctaatatcacatggtggttcagccttcagtctaacatcacatggcccccagtgccactgggtcctggccagggtaccacaggccagctgttcttccccgaagtaaacaagaaccacaggggcttgtactggtgccaagtgatagaaaacaacatattaaaacgctcctgtggtacttacctccgcgtgcgcaatccagtccctaggcccttcctggacatgngggaaggtaccaaganccgcatcatcacangagaagggatcattttgcttgttnttgtgcaattggtgccagggacgctgctgctattnaggaaacggngncaaaatgagaagtttggggtgnacatgccaaatgactatga

SEQ ID NO: 221 - DNA, 524 bp, Homo sapiens
  misc_feature (1)...(524): n = A,T,C or G
gactgagacatctggtgacaaaggaatctccgccttccctgagtcagacaacctgttcaagtgggtggggaccatccacggagcagccggcaccgtatatgaagacctgaggtacaaactctccctagagttccccagcggctacccttacaacgcacccacagtgaagttcctcacaccctgctaccaccccaacgtggacacccagggcaacatctgcctggacatcctcaaggataagtggtctgcactatatgatgtcaggactatcttgctctctatccagagcctgctaggagaacccaacatcgatagccctttgaacacacacgctgcggaactctggaaaaaccccacagcatttaagaaatacctgcaagaaacctattcaaagcaggtctccagccaagatccctgatgcaagctggccgccctgcccctcttttgtgttgncttttttcttagactatctgtcctttctccttgatttctaaactatgttattttttggtttggttcggttt

SEQ ID NO: 222 - DNA, 218 bp, Homo sapiens
gactgaggtgagaagtctgggaaggagctagaggaggtgaagctgcagaacaccagcaagcagattgtccagaatgccatcctgcaagccatgcggcaagtctcccaggagagcctgcggagggaaggcagacccggtgacagcagggcctggggccagctgggagggcgcgagctgaccaagaaacatgaaaagaagtaaccgggtaaaaaaaaaaa

SEQ ID NO: 223 - DNA, 381 bp, Homo sapiens
  misc_feature (1)...(381): n = A,T,C or G
tgagctttctacactgccaagtatggttacaagttgtgcctgcgcttgtacctgaacggggatggctcaggcaagaagacccacctgtccctcttcatcgtgatcatgagaggagaatacgatgctctcctgccctggcctttcaggaacaaggtcacctttatgctacttgaccagaacaaccgagagcatgctattgatgccttccggcctgacctgagctcagcctccttccagcggccacagagtgagaccaacgtggccagcggctgcccgctcttcttccccctcagcaagctgcagtcacccaagcacgcctacgtcaaagatgacacaatgttcctcaaatgcantgtggacactagtgctagggatggggga

SEQ ID NO: 224 - DNA, 451 bp, Homo sapiens
  misc_feature (1)...(451): n = A,T,C or G
tgtggagaaggactgctccatnaccaagntcntgaaccgnatccttggnctggnggtgcacangcagaacgccctgttccaatacttctccgacaccttcgaccacctcatcgagatccgacaagaaggaggncngatncgacatggccatcctagacctggcccctggcntcaacatanatacatgacnaaagccagnaggggtnncnggcacctggncacccacaggatgggcaagtggtcttctacaagattagcgtggaccgcggtatgaagtgggaagaggcattaactaggtcgctggagctcaaaggtccctatgatggcttctacctctcctacaaggtacgaggcagcaaaatgagctgcctcctggcagaacagaatcgcggcgagtatttcaccgtgtacaagccaaacatcggcagacagagccagcttggagaccctg

SEQ ID NO: 225 - DNA, 470 bp, Homo sapiens
  misc_feature (1)...(470): n = A,T,C or G
gaggtgtgagcaggcattactgagctggctgatccatcatggcggagaaagtgaacaacttcccaccatatgcccaaatncatcccactgatagccatgtttctaccaagacttcgaggcagacatccctcctcagcatctcagcttgaccaagcngcctctactacctctggatgtgacaganagttccttnagcttcatggcattcttcttcaccttcatggctnagctggtcatcagcatcatccaggctgtggaaattccaggctggggagtctgnggctggattgccaccatttccttnttcaggacaaacatcggctcagcagtggagatgctcattcccacggtcatgtacacagttgnggccgtcttttccttcaatgctctaagcatgggttcataagattctaccggagtagccggaggcagtttaacaaggnntcaggaggaatgagaccactggagca

SEQ ID NO: 226 - DNA, 477 bp, Homo sapiens
  misc_feature (1)...(477): n = A,T,C or G
tctgaggctgaccctgcacctggctcctaccccacacagagttgccaccctcatctgactccaagttatcctgtcacccagatgcagcatgccagtggccagaaactggcctcctggcctcctggccacatgcccagcctacctccataccagcctgcgtncggcctgtgctatgtgcanaaccactttggtcctaaccccaangcctccagtgtgtaccnagnttntgnagggacctccnagggggtacagactccctcccctatcaanngtnctgncactggagtattcaggggccctggaaccccaagggctacaggntccaaggagtcttccaaggtagccatgccctaaccagnctgcaaaggcggnttccaccttgttggacagaggaaggttctgagaatgtangaattatttattgaagccaaggcatgccggcctgncattccagctgcttggggggtaaggccaaaa

SEQ ID NO: 227 - DNA, 138 bp, Homo sapiens
  misc_feature (1)...(138): n = A,T,C or G
atacttgaatggacatattaagcaggtgcacacttctgagctgaccttacaagtgtcaggcgtggtcttgggagcagnagcgggctgncncccgtggaacctcttcctagcgacctgccatcatgggattttgcccag

SEQ ID NO: 228 - DNA, 469 bp, Homo sapiens
  misc_feature (1)...(469): n = A,T,C or G
tctgaggcagaagactttaaccaagggcggtgagcagatgtgtgagatcttctattctagaagtggacgtatatcccagttctcagagccccgtattcgagccccgtgggatccggaggctgccaaccagctccagcatgcagaacagtcacagcggagtgaatcagcttggtggtgtctttgtcaacgggcggccactgccggactccacccggcagaagatcgtanagctagctcacagcggggcccggccgtgcgacatttcccgaattctgcaggtgnnctnantatgcatagnttnttggntgctggctagcganaagcaacagatgggctcagactgcntgtatgatanantaaggatgttgatcgngcataccggaagctggntgcacacgccctggttganatcccnggacttcngnatcagggcaacnnacgnnaggttaaagtttatgcagcccacctt

SEQ ID NO: 229 - DNA, 538 bp, Homo sapiens
  misc_feature (1)...(538): n = A,T,C or G
ctcagtagtatctcatgacagtaagctgtgaccttcttgnctaaccatgatgacagccggncgctctatgctatcccagggttggactatgtcagncatgaagacntcctcccctacacctccacggatcaggttcccattcaacacgagctctttgaaagatttcttctgtatgaccagacaaaagcacctccttttgtggctcgagaaacgctgcgggcctggcaagagaagaatcacccgtggctagagctctctgacgtgcacagggagaccaccgagaacatccgcgtcacagtcatccctttctacatgggcatgagggaagcccagaattcccacgtctactggtggcgctattgtatacgcttggaaaacttggacagtgatgtggtacagctccgggagcggcactggcggatattcagtctctcagggaccctggaaacagttcgaggacnaggggtggtgggcagggaaccagtgntatccaaggagcagcctgcattccagnatagcagccatgtctctctgaaat

SEQ ID NO: 230 - DNA, 384 bp, Homo sapiens
  misc_feature (1)...(384): n = A,T,C or G
cccgggaggccgccttgnntttatacactgntntcaccanacnncnnaaacnggctggngtnactgnnctcantagctggcttacantnaanggcttnagttttcacaggggccgatcaanagtgctantcgagatatttccggtctccaaatgccatggagattgngaccctttagttccccnanngtttnggnnctcttactgttgaaagactaanagcnttgataaatccanccaatgtaaccttcnaaatctatgaaggcatgaggcacagctcatgtcagcaggaaatgatggntgtcaagcactnaattgataagctcntacctccaattgattgacatcactaagaggccttgagtngaagttcaccagcatcacag

SEQ ID NO: 231 - DNA, 140 bp, Homo sapiens
tgagccaaacacgtttatttactaaccaaagggatgatcctgggtaaaccaagtttgacatgaagttccatgtaaagtgtttgtgataaagagaactcaacagtcatgaaaaataaaaccaaagaagtgaaaaaaaaaaa

SEQ ID NO: 232 - DNA, 537 bp, Homo sapiens
  misc_feature (1)...(537): n = A,T,C or G
tgagaacatttgcaccaatgtgggatgtattcaaaacatctacagagaaattagcaaattgtcatttggatcttgttagaaaattacaggaattaataaaggaagttcagaagtatggagaggagcaagtcaagtctcataagaagactaaagaagaagtcgcagggactctggaagcagtccaagccattcagaatataactcaggcactccagaagtcgaaggaaaattacactgccaaatgtgtagaacaggaacgtctgaaaaaggaaggagctacacaaagagaaatagaaaaggcagcttgttaagtctaagaaagctacagatacttataaactttatgtggaaaagtatgcattaacaaaagcagattttgagcagaagatgacagaaacagcccagaaatttcaagatattgaagaaactcacctcattcacataaaggaaattatcggatccttgtcaatgctggcaaggagatccacttacagatcnggccaggttcatgaagagttataattaccatggctaata

SEQ ID NO: 233 - DNA, 160 bp, Homo sapiens
  misc_feature (1)...(160): n = A,T,C or G
agttctgtgctcaatcgcacagccggcaatttggaaagaaacatctttttgaccaggatgaagagacgtgctggaactctgaccaggtgnggtgcttctataccccttnattccaagngtaggggtgtanaanatgcaaggttacagggtgccttgagat

SEQ ID NO: 234 - DNA, 540 bp, Homo sapiens
  misc_feature (1)...(540): n = A,T,C or G
gaactgaggtattttcaaggagaaataattccagnttgatggatgaaattttaaaacagcaacaggaacttttgggccaagattgttccaaatactcagcagagtttgcaaatagtaatgacaaagacgatcaagatttaaattgcccttcggcagtgaaggtgctgtccccagaagatggaaaagcggatattgtgagagctgcccaggatttttgccagttagtagcccagcagcagaggaagcccacagatctggatgtagatctgctaggcagcttacttagttcacatgggttccctgatcctgacttagtgttgaagtttggtcctgtggacagcacattaggctttcttccctggcaaatcagattgactgagatcgtctctctgccttctcacctaaacatcagctatgaggacttcttctccgcccttcggcagtatgcagcttgcgaacagcgactgggaaagtaatggtccctacttgcataatttgacttcaggcttttggagaaaaaggacccaagtgacactgaaa

SEQ ID NO: 235 - DNA, 166 bp, Homo sapiens
  misc_feature (1)...(166): n = A,T,C or G
tatagccagacagaatggactgggctctcacctcagtgccagtggcactgagtgttacatcacgtcagatatgntctatgtggaagtgcagttagatcctgcaggacagctttgtgatgtcaaagtggctcaccatggggagaatccngngagctgccagagcttg

SEQ ID NO: 236 - DNA, 123 bp, Homo sapiens
  misc_feature (1)...(123): n = A,T,C or G
ttacacccagtgcatttggctttcctntgcggntccatcanngggacctgttccacgctcctcttccagcctttggatctcctcaaaacccgtctgcaggccctgcagccctcagacctaggg

SEQ ID NO: 237 - DNA, 232 bp, Homo sapiens
aaagatcgagaacaccggcataaggagcacaagaaggataaggataaggaccgggaaaagtctaagcatagcaacagtgaacataaagattctgaaaagaaacacaaagagaaagagaaaaccaaacacaaagatggcagctcagaaaaacataaagacaaacataaagacagagacaaggaaagacgaaaggaggaaaagattagagctgctggggatgcaaaaaaaaaaa

SEQ ID NO: 238 - DNA, 368 bp, Homo sapiens
  misc_feature (1)...(368): n = A,T,C or G
ttccaggaaccagcgcgggacattggcttcaacgtggcggtactgcttaccaacctgtcagagcatgtgccccacgacccgcgcctgcgcaacttcctggagctggctgagagcatcctggagtacttccggccttacctgggccgcatcgaaatcatgggcgcatcgcgtcgcatagaacggatctattttgagatctcagagaccaaccgtgcccagtgggagatgccccaggtcagtaggccttgcgtgtttatgaagccttggtacccttgaaaatcctntatgggggctgtatacnccttcagtgtntgcacctaaccctactnggnctctgacaaagcccaggcccctcccccaatgtattg

SEQ ID NO: 239 - DNA, 423 bp, Homo sapiens
  misc_feature (1)...(423): n = A,T,C or G
tcattctaagatccctgctcccaaagacatnctcgcacatcaggtccctaatgccaagaagctcaggctgaaaggaggagttatgggagaaactggcaaagcagggcgaactgcccagggatgtgcgcaaggcacaggcncnactccttagccctcccacaccaaaggccaaacctgggccccaggacatcattgagcnacccttctatgacctctgaaacccanacaaccctctggacacgccttttgattggtcaggatgcattttttttggaacagancaagaagaaaggcgtgangcggccacaacgcctccacatnaagccntcccaggagcctgnagtggaggtatntcctgcaggagcctcctacaacccaacctttggagatnaccaggccntgctttnagaggccccatggaag

SEQ ID NO: 240 - DNA, 452 bp, Homo sapiens
  misc_feature (1)...(452): n = A,T,C or G
gactgaggtatgtgagaagactgctgagctagatgcngttgcctggtncctgggnatnngacgcgccctgctttgccattncgcacccacatgtgtgggctntagtgtnccacgganacaccagttnngctgttgtcagttttttttctctgagntggactataagccacatttcctnttnctctangaagtaggttaggaccgtgggctttggnaangagaccnnggtggccgtgaccataaaganacttangnaaaaaagctcaggcaccctggacatgtccgtgtcttacaaggaggnggatcgctacgacgctccagggattgccttttaccctggtcaggctcagcttgctcanctgtaagcaccactatgaggttattccacctctttgncagccctggncanccggganacaggaactgcaccactcaaaggatcaattacaccc

SEQ ID NO: 241 - DNA, 428 bp, Homo sapiens
  misc_feature (1)...(428): n = A,T,C or G
gactgaggacagaaaatantatccaangnaatttttgcactagcagtatcaatctgtagcaagaaagttgaccagtctgttccagccaatgaaatttcccagaaggcagcagagagccaaggcaggggaaaggagactttgaaaaaagacctgctggacattattaaggacatgaaagttgacctgagcacagcaaatgtgaaaacaccaaagccacgtggcagaaaaccttctgccagtctggaggctaccgttgacaggcttcagaaagctccggaagaccctccaaagaagaggaatgagttcctgagtcctgagttggtggctgcagcgtcggctgttgcagattccctaccttttgacaagcagacaaccaagtcagagctgctcaggcagctgcagcaacacgaggaggagttgagggctca

SEQ ID NO: 242 - DNA, 421 bp, Homo sapiens
  misc_feature (1)...(421): n = A,T,C or G
gactgaggctgtggagctgcggacctatggcaggagaaagcttgtgtggtggccggtctgcgacgcttcggctgcatggtgtgccgctggatcgcccaggacctcagcaacctccggagcatcctggaccaacacgatgtgcgcctggtgggcagtggggcctgaggccctgggcctgcaggagtttctggatggtggttacttctcaggagaactctaccttgatgagagcaagcaaatctataaggagctgggcttcaagcggtacaacagcttaagcatcctaccagctgccctgggaaaacctgttcgtgatgtagcctccaaggctaaagctgttggtatccaggggaacctgtctggtgacctgctgcaaagtggagggctgctggtggtcancaagggtggcgacaaggtactg

SEQ ID NO: 243 - DNA, 159 bp, Homo sapiens
  misc_feature (1)...(159): n = A,T,C or G
gactgagcttgctgaantaaagcaagaangtcttgctcgtggttnagagaccaagggaataaaacaagatcttataaataggctgcaggcctatcttgaagaccatgcagaagaagaagcagatgaagaagatgtactgggagatgaaactgaggaaga

SEQ ID NO: 244 - DNA, 273 bp, Homo sapiens
  misc_feature (1)...(273): n = A,T,C or G
atctctgtgagggatcaagggacngctgancagacttcctgctgctggtgttgnggacanggtgatggccacagctctaagaanggcacaccaccaactaaggaaagaaggtacatccagcagnggtaattccgacaacgtatagtcatatcnaagagaagatgggggtgnttntttactntgnagataacgcaggggtcatagttntcantatangannagatgaaggcttctgctatcacanntcnagtgacaaagtgagtgtgcagactt

SEQ ID NO: 245 - DNA, 153 bp, Homo sapiens
  misc_feature (1)...(153): n = A,T,C or G
gacccctccttactcactggcncntcagctttgatttttaacttcccttccncacctttcccgaacacacacattcccatttcaaaattgattttataaagacattttaaatatactgatgcaacttggtgtgcactacggcaaaaaaaaaaa

SEQ ID NO: 246 - DNA, 252 bp, Homo sapiens
  misc_feature (1)...(252): n = A,T,C or G
caccactagaggacatgggacagcctacagtggaggaggctgagcagcctggagccctggctcgggagttcctggcagccacagagcctgagccagccccagccccagccccggaagagtggctggacattctggggaacggattgctgcggatgaagacactggtcccaggcccgaaaaggctctagccgcccactcaagggccaggtggngaccgttnacctgcnaatgnncctggagaatggcacccgc

SEQ ID NO: 247 - DNA, 235 bp, Homo sapiens
  misc_feature (1)...(235): n = A,T,C or G
gactgagcttgctgagttgtgggaggagtgcttccctgannccggcggtgttccagactcctccgtcatcctcctcttcccagctaggatggcgagctcctgtgactggtccgtcactctccccccagccgtcttgcatagatttggaatctttaaggaaagagtgaatcgattctttgcagtaaatacatgtaacaaacagagagatttcttgcaaatgcagcatttgaatatc

SEQ ID NO: 248 - DNA, 310 bp, Homo sapiens
  misc_feature (1)...(310): n = A,T,C or G
ttgatcacttcttccttctgaagtcccgccctttcggctacccccaatggagactaagctgttactgaaaagganccgacaaaagcgtcaacngnggagtcgagaggagctggaagnagtcagattncgctaagggccgtaaagcgganagtgatttcgccttccggattaacgacagcaactccgacttgtcagagcaggccatnctcgtgctggacncttcctaattcaatttccttcccattccggncccttccctatcgtcgcccctttcaccttggatcatgntcgaaaaaatttgatgaaaaag

SEQ ID NO: 249 - DNA, 294 bp, Homo sapiens
  misc_feature (1)...(294): n = A,T,C or G
ctgagatccaggatgagaaggatgttacaagcagcanctagctgaacagctataaantgcccaantctgggttcacaaaaccagntnanagngaaaattctgacagtgacagcagtatggnaggagaggccatatggaaganagagtaacanacaagattgnatcttacagcaaaacttcaaaaattgaccgaggtgatatgggcaaggaaatgagagagaaaccatccatgaaacgaaagctgccttttacagtcagcccatcgagaaatgaggagcgcgactcagacacaga

SEQ ID NO: 250 - DNA, 529 bp, Homo sapiens
  misc_feature (1)...(529): n = A,T,C or G
actgagggattttttatggagtattgtgaggagcggtgtggnagcagtcccaagatggcaaccgggactgcagctaagtcttatgacttgcacctgacttcttcatacacctgaaaataagccatgaccgtcatgagagctgcgcaggtgcaccatgatgctggtggtgtaaacaagtccatatttggtggagatgtgcccctgccgccctgattggctaaagctgtgtgcctggtgagatggcagtggcctgccgtgagtgcatggggattgagagtatataagagtgagaagcccgagtggtttncggtgtgcccttgtcatanacaacgtcagtgcaggcttaagcctgagtctggngccaacccctccccagtgggtgcatgcaaattaggtgctggcagactgaccaatctcaggaggacacaaagcctttccctgtgctcaggtgcatataagcagacctccctgggtgcccagagtcccagtagcagcatcaaggcattnctgcaataaaggctgttaaagt

SEQ ID NO: 251 - DNA, 494 bp, Homo sapiens
  misc_feature (1)...(494): n = A,T,C or G
tgaggtccgatctagatcccttcccgatccaggggaaggcgatactctcgctcccgcagcaggagccgaggacggaggtcaagatcagcatctcctcgccgatcaaggtctgtgtctcttcgtagatcaagatcagcttcactcagaagatctaggtctggttctataataggatcgagatcccgctcaaggtcgagatcaagatccaggtctatttcacgancatgaagcagccgatcaaaatccagatctncatctcctaaaagaagtcgttcncgcatcaggaagtccacacagaagtgcaagtccagaaaagaatggactgaagtttctcaagttcaccccntaggggaaaagttatttttagtttacattattataangggatttgttatgnctngaaaggcgtacgcnaggaagggatcatcaaccatttaatcaaaatggatctgggattattactctgtaaaattcacagcagtaaatattgtttt

SEQ ID NO: 252 - DNA, 456 bp, Homo sapiens
  misc_feature (1)...(456): n = A,T,C or G
gactgaggccttgaagacgaaggtgggaatcctgatgaaattgaagtcacctcagaatgcaacaagaagatgcctaagaggcccagcaaagggaggaaaccntnngncgagggtgtggaggacaacgggctcgaggagaattctggggatgggcaggaggatgtggagaccagcctggagaacctgcaagacatggatatgatggacatcagtgtgctggatgaggntgacattgacaatggcagcgtggcagactgtgtggaggaagaggaggaggccacactccctgagggcctagcagacagcactgaactggtagaaggagatttgaaagggctcccagaacagctgcaggagcatgctatagatgacaaggacaccgttaacaatgtagatacgtcatcatctgacttcaccatgctgcaggagatggaagaggcatctttggagcccgaa

SEQ ID NO: 253 - DNA, 219 bp, Homo sapiens
gactgagggactggggagatggctcccggttaaaggtgctcgctgctcttccagaaggaacaagttcagttctcagcacccaagggaggctcacaaccccctgtagttccagcatcagagggtctcaaaccctcttcctgcctcaccggacatcctctcatgtgttgcgtacatatacacgaacgttacatataaataaaaagccttaaagaaaaaaaa

SEQ ID NO: 254 - DNA, 220 bp, Homo sapiens
  misc_feature (1)...(220): n = A,T,C or G
actgaggtatgtaaaagaaggagatacggtgtctcagtttgacagcacctgtgaagttcaaagtgacaaggcctctgtcaccatcaccagccgttacgatggcgtcattaagaggctctattacaatctagatgatatcgcttatgtggggaaaccactgancgacattgagacagaagctgtaaaggaaggaaggaagaaagaaagaaagaaagaaaaa

SEQ ID NO: 255 - DNA, 326 bp, Homo sapiens
  misc_feature (1)...(326): n = A,T,C or G
ttactgagttcttgccatgacaggttngcagccccgtgttcgcaatgcagcacgtggtgggtgtaccccgtttactggtacggagaaccttccttgggacggacgtcaccatgacaaggactctgtgcagtccaggtcccagagagaagcgaccggaagccgcagccttagggctctttcaccgcctcccggaattgggaagaacacttgagccacaccgttngccatcaagnagcctctactgccaaggcttggtgggacagatatgaagagtttgtgggactnaatgagagttcgggnggcccagggaaacgtgacagaggcgg

SEQ ID NO: 256 - DNA, 190 bp, Homo sapiens
  misc_feature (1)...(190): n = A,T,C or G
cattgtttagatctcactncgnataaaggtgacttacaccttgacgatggcagacataggcatttggttctacagatggccttgaaatgtgctgatatttgtaacccatgtcggaactgggaattaagcaagcagtggagtgaaaaagtaacggaggaattcttccaccaaggagatatagaaaaaaaaa

SEQ ID NO: 257 - DNA, 523 bp, Homo sapiens
  misc_feature (1)...(523): n = A,T,C or G
actgaggtccctatactccctgggcaggcttgcctganattgcagcttttcctgtgcgccctgcctctccttgccgcctccggtccttccaatactctccagctggataagctcatacctcagactcttctaaactagctgcttggcttgctgaattaccaaggggaaatgtggttccagagacaaattgttgggttcggcccccgnctactctggggtggtgcttagccggcgccagaccgaccctcggctccggagcggcagtgccgtccctctcggcgcctcctcggcttctccggcttcctcggcttcctcggggaccgcggaccctggtatatgcccgactgctgagcccgctaaagccatgtcgaccccggcccggcgccgcctcatgagggacttcaagaggttacaggaagatcctccggccggagtgagcggggctccgtcggagaacaacataatgggtttggaatgcggtcatttttgggcccgaagggaccccgtttggaggatggaacat

SEQ ID NO: 258 - DNA, 538 bp, Homo sapiens
gactgagtatttctcagagattgatggaaacagaaaccaaaactcttcccctggagaatgcatccatcctttcagagggctctctacaagaaggacaccgattatggattggcaacctggatcccaaaatcacagaataccacctcctcaagctcctccagaagtttggcaaggtgaagcagtttgacttcctcttccataagtcgggtgctttggagggccagccccgagggtactgttttgttaactttgaaactaagcaggaagcagaacaagccatccagtgtctcaatggcaagctggcgctgtctaagaagctggttgtacgatgggcccacgctcaagtcaagagatatgatcataacaagaatgataagatccttcccatcagccttgagccatcctcaagcactgagcctgctcagtctaacctcagtgtcactgcaaagataaaagccattgaagcaaagctgaaaatgatggcagaaaatcctgatgcagagtacccagcagcgcctgtttattcctactttaaacc

SEQ ID NO: 259 - DNA, 358 bp, Homo sapiens
  misc_feature (1)...(358): n = A,T,C or G
tggcttcccaagccgctctggtttctcctcgccaccaccctggagtccaagctggggaagacgattgttatcaccaagacgaccccacagtctgaaatgggaggctactactgcaatgtctgtgactgtgtggtgaaagactccattaagttcctggaccacattaatgttttagaaacatcagngaaacctgggtatgtccatgcgagtggaacgctccactctggatcaggtaaagnagcgtttntgaggtgaacaagaagaagatggaagagaagcagaaagattatgattttgaggaaaggatgaaggagctcanagaagaggaggaaaaggctaaagcataccaaaaaaaaaa

SEQ ID NO: 260 - DNA, 348 bp, Homo sapiens
  misc_feature (1)...(348): n = A,T,C or G
gactgaggatttgcagttcctgactaccgctcttctcatattgaagttagccaggcatcacagcttttacagcagcagcagcagcagcagcagcttcgaagacgaccttccttgctttcagaatttcacccgngattctgacaggccntcaagagaggagaactggattatngaacagtttcacttcaggaccctcaccganggatcatgattccttggagtccaaacgnccacnccaggaaccagttactanntgcccatttncaagcgngttaagtnactannggatttacnntttagttcacntccctgccagaaggctngagntcgtntgctgatgcaaagaga

SEQ ID NO: 261 - DNA, 519 bp, Homo sapiens
  misc_feature (1)...(519): n = A,T,C or G
tcgagctgggagatgtgacgcccacaatattaaacagttgaagagactgaaccaggtcatctttccagtcagctataatgataaattctacaaggatgngctagaggtnggcgagcntancaataccttncatatttcacatgatatagctgtaggngcagtgtgcntgcaagggnnggatncattcacagaatgaaaagagactttncatcatgacactaggatgccttgcaccttaccgaaaactaggaataggaactanaatgttanatcatcgtcctaaacatctgtgagaaggatggcacttttgacgatatctatctgcatgtccagatcancaatgagtcagcgattgncttttacccggaagtttggctttgagattatcgagacaaagaagaactactataagaggatagagcctgcagacgcgcatgtgcttcanaaaaacctcnaaggtcccatctggtcagaatgcngagacacagaagacagacaactgacaaatcacaaatgaac

SEQ ID NO: 262 - DNA, 235 bp, Homo sapiens
  misc_feature (1)...(235): n = A,T,C or G
gactgagctttctcgggctctacttggttgatcgcggacccagaagagaactagtcaactcaagttttaagccatggcccaaagactgatgacattcagagacgtggccgtagacttctctccagaggagtgggagtgtctgagcctggaccagaggagtttatacagagatgtgatgctggagagctacagccacctcgtctcagtgggactttttgnttatcggtcacatctg

SEQ ID NO: 263 - DNA, 249 bp, Homo sapiens
  misc_feature (1)...(249): n = A,T,C or G
taaataaagagtattgagcgaannacctacaacggaccagnggctgcaccactgaggaaactgnnnnttctctanccaccattaaccncctatagcttctnacgaggaagcangggctttgtgagtnaacaaccacntnaccaaccagangntgnaggatncanaagcgactcattgatttacatantccttctgagattgntaggcggattncttccatcagtattgagccgggagttgaggttgaag

SEQ ID NO: 264 - DNA, 535 bp, Homo sapiens
  misc_feature (1)...(535): n = A,T,C or G
tctgagaggctccggttctgtggcgatctggactgtcccgactgggtcctggcagagatcagcacactggccaaaatttcctctgtgaagctgcgactgctgtgtagccaggtgctaaaggagcttctgggtcaggggattgattatgagaagatcttgaagcttactgctgatgccaagtttgagtctggagacgtgaaggccacggtcgcggtgctgagtttcatcctgtccagtgcagccaagcatagtgtcgacagtgattccttgtccagtgagctgcagcagctggggctgcccaaagagcatgccaccagcctgtgccgctgttacgaagagaagcagagccccctgcaggagcaccttcgggcctgnanccctacgtgtgaacaggctggccagcgtgggctggcggggtaaactacaccctgagctccagcctgcttnattctgtggaggagcccatggtacatctgcagctacaggtttgtgcctgntccaggtacccangcccaaccctgtttccatgtcccaa

SEQ ID NO: 265 - DNA, 325 bp, Homo sapiens
  misc_feature (1)...(325): n = A,T,C or G
ctaatccgaaagagaatccatnngcagataancntggactgttcctctacagaaggaaacacacgaaagggccagtcggaagaaattcaaatgaaaagaacccgccgtgcnntcataatnccaacgagccatcactggtgcatctcttgctgatataatggctaagaggaatcgnaaancctagaggtttggaaagccccagctgagagcaggcctatcagggctngccaaggnagcanaaaaggctanngcnggcttnaaannatgacagcaatnggctgctgccnaggcccccanaaanggcagcacctaaacaaaagattcg

SEQ ID NO: 266 - DNA, 345 bp, Homo sapiens
  misc_feature (1)...(345): n = A,T,C or G
acttgaagacgcagctgcacgccataactanggcattcctcntnnaccnttatantgacnngatnnccggangtagccagngcacttggncgctgactatngaggcatcanatcttgcctaggntcactggacaaantatgaggaggacaaattctaccttgaccctatntaaaagaggttattcgggaaaagaaaggagagagaanagtggnctaaggaagtgatctttttanttaagatctgngtgtgtgcctggtctcaccatacttttacanagntatttaaacccaaatcacaatttaangattattngnttctacctatnncnacactttaaataaaca

SEQ ID NO: 267 - DNA, 208 bp, Homo sapiens
  misc_feature (1)...(208): n = A,T,C or G
gactgagccctcccaggcaccaatacttcaaagcatcttacctctgctcaatatatattacttggagaggattgaggaaactgctctcaaaaaaggtctctctactcaagccatctggcgccgactctgggatgaactgatgaagacaaggccttccagtttggagagaggnacnntctgncnanccctgactatgctggcacccact

SEQ ID NO: 268 - DNA, 249 bp, Homo sapiens
  misc_feature (1)...(249): n = A,T,C or G
ctatgatccagccagacacaagcactctaagtgtgcttcagncagtggctgtgccgcctgcacaatgaggtgaatcggaagctgggcaagcctgattttgactgctcgagagtagatgagcgttggcgtgacggctggaaggacggctcctgtgactagaagattaccagcagttcgtgaggggcatctagcctnggttctatggncaacagcctgattgacgattaaagtgcatctgagccaaaaaaa

SEQ ID NO: 269 - DNA, 187 bp, Homo sapiens
  misc_feature (1)...(187): n = A,T,C or G
tgcgcgctgtgcatcangtgagacctgcagctcanaactggggttcagcaagaactggtcccggaggaacgnagnaggagatgcctnntggcnctantnaccctgtctactnngaactgactttntttgtcnctccaanacnaccttctncacaactncagtgacgctttncactcctgaggatgct

SEQ ID NO: 270 - DNA, 274 bp, Homo sapiens
  misc_feature (1)...(274): n = A,T,C or G
gactcagaccacacagccgtctagaanaagcagaaaccagctgagctatctggaagagctttagaccaactgagacactgaggaggacactctccagcctgttgagctgcctgcaggctgtgcagtgtgctacaagttcccagcgttgtgagctgtcacccatgctggggtgggcctccgggatgcagctgtctttgagtcatttctgctccgataagtaacccctcacccatattcttccaaggaaccccaataaaactcatggcttaccaag

SEQ ID NO: 271 - DNA, 274 bp, Homo sapiens
  misc_feature (1)...(274): n = A,T,C or G
gaactgagaatggaatgacctatgtangcatgtgcatgtaaacttcactggcgaagagtgggctttgctcagtccttcccagaagaggctctacaaggatgtaatgctggaaacctacagaaacctcactgctataggtctgcagntgggaaaaccgtaatatngaagaatattttcaaccgttctagaagatntggaaggcatgaaagaagtcatactgggagaaaaaccttctgtatatactcaatgnaataaagcatttgcatatcagaga

SEQ ID NO: 272 - DNA, 534 bp, Homo sapiens
  misc_feature (1)...(534): n = A,T,C or G
gactgaggtggggtctttactacgggccacgcaaagctgggcacacacacaatggaagtgactgtctaccaccgacggggttcccagagctacgtgccccttgctcacgccagttcaaccttcaccattactgaccaggtacctttctccgtgagtgtgtcccagctacaggccttggacggagagaccaagcacttcctgagaaatcatcctctcatctttgcccttcagctccacgaccccagtggttatttggccgaggccgacctctcctacacatgggactttggagatggtactgggaccctgatctctcgggcacttgatgtcactcacacttacctggagtcgggctcagtcactgcccaggtggtactgcaggctgccattcctcttgtttcctgtggttcctccccagtcccgggtaccacagatggctacatgccaactgcagaagcacctggaaccacatctaggcaaggaaccactacaaaagttgngggtactacacctggccagatgccaactacacag

SEQ ID NO: 273 - DNA, 305 bp, Homo sapiens
  misc_feature (1)...(305): n = A,T,C or G
caaggcaggttactaaagatnnacaggcaagatggntatcccagcaagttggncctggcctacaaagtctgcatgaccggaagaangtcatccctgggttnttcttgtggcagcacannacccgcctgcagattgcataggacccgtctctggactatgagtacttgcccctggtgggcctgaaatcattcatccagtccttctctggaactcctctttggaaagcacagcgaagccattgcgganaaaagggctgggggngngcacatcgntaggtgagagtggagccttccagctttggggct

SEQ ID NO: 274 - DNA, 233 bp, Homo sapiens
  misc_feature (1)...(233): n = A,T,C or G
catggacccctccccacgagngcaggnacaccccagcactgggaggcccgatgcanagggngaccccnccaagaggantggccagtgttgggccccagggctatggaactggcatgcggcccccacccaaantcccttgccaccagccaggtcctgccgtcnatgaacatgggtccaggagtgcgtggnccatggtccacatccaggngaaagtnngatcccggactcttcct

SEQ ID NO: 275 - DNA, 510 bp, Homo sapiens
  misc_feature (1)...(510): n = A,T,C or G
tgctttgtgcttgtggagacctggggccatcnnctggcacagtaggatgcccccgngtcctcctcagcagaacaggaacaggttatcacagctgcctgttggggagcttgnagagatggaactgacttggcaagagatcattgtncattactgagctgcagggtctaaatgttccaagtgagacatcttttgagcctcaagcacccaccccataccctgggccactgccacctccaacatattgcccctgttcaattcatccagatgcaggcttctcccttcccccaccatcttatgagctcccagcatctactccccatgtcccagaactaccatactcctatggtaatgtagccataccagtgtcaaagccacttaccctttcaggcctgctcaatgagcccctcccagaccacttagctctcctggacattgggctgccagtggggcaaacccaagccccaagaagacccagaatctgactcaggattatccctcaactacagtgag

SEQ ID NO: 276 - DNA, 503 bp, Homo sapiens
  misc_feature (1)...(503): n = A,T,C or G
aaagatgatgtctgcaaacaccgtggctaaagtgatgatcatnatgctggcagnctgtcttcttacccaaacggatgggaaacccgtgaggaagagagctgtcagtgaaatacagcttatgcacaacctgggcaaacacctggcctccatggagaggatgcaatggctgagaaggaagctgcaagatatgcacaattttgttagtcttggagtccaaatggntgccagagatggcagtcaccagaagcccaccaagaaggaggaaaatgtccttgttgatggcaatccaaaaagtcttggtgagggagacaaagctgatgtggatgtattagttaaatcaaaatctcagaaatgctgatttattctagacagtgcagggcactgacntatgctgctaccttttcaagcttatgaagatcaccaagtgctaatacttctactgnaatgaaactttggaatttttttgattacntttttgctcatttaaggtctctttcaatgat

SEQ ID NO: 277 - DNA, 258 bp, Homo sapiens
acctaccctgaagaagaaagcaattcggaatcagctagcatttctgcagcaagacacatatctgaggacaggagagagtctgatgactcggatgttgatttgggctctgcagtgagacagctgcagagagttcattcctgacatacaggaaagggcggccaccaccatcagacgcatgtatcgggatgacctagggcgcttcaaagaatttaaggcacaaggtgtggctattagatttggcaaattttctgctaaaga

SEQ ID NO: 278 - DNA, 485 bp, Homo sapiens
  misc_feature (1)...(485): n = A,T,C or G
ttgattttgaagtatgtnattgtcggtgccantgctctttggtgtgctgcgggagccggacattntgaagttgttaaacttctagnnagccatggagccaacgngaaccacaccacagtcactaactcaactccattgcgggcagcatgctttgatggcagactggacattgngaaatattncggttgaaaataatgccgaatatcagcattgccaacaaagtatgacaacacctgcctaatgatnggngcatataaagggcacactggatgtggtcagatacctcttagaacaacgtgctgatcccaatgctaaagcacactgnggagccacagctttgcacttttgcagnctaagctggtcacatttgacatttgtgaaaganctgataanatnggagagctngcantagctggtgaatggncatgggatgacnccattgaagggggccgctgaaagctgtaaagctgatgtcgttgaacttg

SEQ ID NO: 279 - DNA, 174 bp, Homo sapiens
attcatttccatttcaacaaatgatggcagaagttcctaacatggcagtcaccgactggacagcaggtgccagcagtagctcctaacatggcaaccgtgacagaacagcaggtgcccgcagacgctcctgtccaggaacctgcaccagaaataatactgagattttaaaaaaaa

SEQ ID NO: 280 - DNA, 458 bp, Homo sapiens
  misc_feature (1)...(458): n = A,T,C or G
gaactgaggttttactgcaatcactgcaacaaaccccatttggcttataaagactcgcttacagcttgatgcaaggactcgtggggaaaagcaaatgggtgcttttgaatgtgttcgtaaagtctatcagacagacggactgcgaggattttataggggcatgtctgcctcctatgccggcatatcagagactgttatccattttgttatttatgaaagtataaagcaaaaactactggaatgtangactgnttctatgatggaaactgatgaggagtctgtgaaagaagcatcggattttgtgagaatgatgctagctgctgccacctcaaaaacctgtgccacaaccatagcgtatccacacgaaganngaagancnggactacntnnataanggacacactntagggannttntntcngcncctggntttgagtgnaccctaagaaggcttacgg

SEQ ID NO: 281 - DNA, 479 bp, Homo sapiens
  misc_feature (1)...(479): n = A,T,C or G
tactgaggatgactatatggaagcgctggcccggctcctctcacagtgaccagggcctacaaggtgaacactgatatcaactttgaggtgtttattcataaagtagatggtctgtcagatgaccacaaaattgaaacccagagagacattcaccagagggcaaacgatgacctcgctgatgctgggattagaaaaaattcaccttgagcttttacctgacaagcatatatgatcattcaatatttgaagcctttagcaaagtggttcagaaactgatcccacagctcccgacgctgganaatctgctgaacatctttatctcaaattctggaattgagaaagcgtttctgtttgacgtggtcagtaagnatttatatttgcaactgacagcacgccggtgggacatgcagacgtacgagctcttgctgngacatgattgacggnggtgatcgacatctcttgtatttatgggtctcaaa

SEQ ID NO: 282 - DNA, 360 bp, Homo sapiens
actgagctggagagaggcgttcgtgagagtggatggttacttcggcagagcaccattctgaaacgctggaagaagaattggttcgacctgtggtcagacggtcacctgatctactacgatgatcagactcggcagagcatagaggataaggtccacatgcccgtggactgcatcaatatccgcacggggcatgagtgccgggacatccagcctccagatgggaagcccagagactgtctgctgcagatcgtttgccgagacgggaagaccatcagtctctgtgcagagagcacagacgattgcctggcatggaagttgacactgcaggattccagaacaaacacagcttacgttggttca

SEQ ID NO: 283 - DNA, 259 bp, Homo sapiens
gaccatcgagcagtccctgctggccacacgggtgggcagcatcgccgagctcagtgaccttgtgtcccgggcgatgcaccatctacagcccctcaatgcgaagcaccacggtaatggcacgcccatgcaccacaagcagggggcgctctactgggagccagaggccctgtacacgctctgctacttcatgcactgcccgcagatggagtgggagaatcccaacgtggaaccttccaaggtcaacctccaggtggaaagg

SEQ ID NO: 284 - DNA, 460 bp, Homo sapiens
  misc_feature (1)...(460): n = A,T,C or G
gactgaggtgtcccaagctagaggtaagcatggcagtaacaggaacccactgctgagcagcttgcgcagatagctgcagagaatgaggaagatgagcactctgtgaactacaagcctccagcccagaagagcatccaggagatccaggaactggacaaggacgatgaaagcctccgaaagtacaaggaggccctgctgggcncgagtagctgtctctgcagaccccaacgtccccaatgtcatgtgtgactcgactgaccttggtatgcagcactgccctaggccttntggaantgntcntgacanngnagccncgagangcttnagagaaanatncagtntgttgttgaaggaagggcgcggngnacctactantaaagnttntttccnggntgaacaagaaagantcgtgtccgncatgaagtacatccaacacacntataggaaaaggggtcaaaat

SEQ ID NO: 285 - DNA, 466 bp, Homo sapiens
tgagtgggttttcctggatgatgtcctgggtcagaggtgagctctgtcgtggggatttggagtggccagcattgtcacaggaccgtatggaaggagggccctttttcttccgtggaagagtgccatgtatagacaccgtcttgataggcatctgtgcgacgctcagcaagaggggacttgctgctcaggaggtccatggacgaggccaaggggaactggtgattcacaggcatgtttctgggaaggcttgcaaactttcccgcagccatgattcttaactctgaggagggaaaagagacagaaggacaaagccttgataattcagaagcttgtctgctgtacgcgtgagactacatagaaagcttggctcacaaggaatatagaaaaacagggtggtgagtcctggccagttcctggcactctgtcagcacttaatcaatgttaatcattgttattaaaaaaaaaa

SEQ ID NO: 286 - DNA, 381 bp, Homo sapiens
  misc_feature (1)...(381): n = A,T,C or G
actgaggttgctcaggacacccctttcccggttcgaggggagtcagccgacgcgcgcgcactgcgcagactcctcgctgcagtgggcgtgatccgtggaggtcccgcccctactcagctgctcagacagaagctggagccccaccgaagtagcagccaacgtctgatttccagtccctgacacacccacctagccaccttcgttctgcagagtcccccagcggtcaggcaatatgaagcccaaactgatgtaccaggagctgaaggtgcctgttgaggagcctgcggnagaactgnccttgaatgaaatngaggcatggaangcagcagagaagaaagcccgctggntnctcctggtcctgatcctggcggtagtgggctt

SEQ ID NO: 287 - DNA, 506 bp, Homo sapiens
tctgcaggagtcagtcgcagtgttgctgtagtgatggcttttataatgaagaccgaccagcttacctttgaaaagcctactgacatcctccggacagtcaagccagaggctaaagtgaatgaggggtttgaatggcaactgaaactgtatgaggcaatgggatacgaagtcgatacggtccagtgccttttacaagcagtaccgtttacaaaaggtgactgagaagtatccagaactttggaatttacctcaggaactcttcgctgttgacccaactaccatttcacagggattaaaagatgacattctctacaaatgcagaaaatgcaggcggtctttatttagacattctagtattttgggtcatagtgaaggaagtgggccaatagcctttgctcacaagagaacggcgccatcttctgtacttaccacagggagtcaggctcagtgccacgtcttacttcattgaggcctgtgcagtggatggaatctaactttgctggaaa

SEQ ID NO: 288 - DNA, 458 bp, Homo sapiens
  misc_feature (1)...(458): n = A,T,C or G
ggtctcctcttttgcttctcgaagccacgtgaaaaaggccgtgacagacttgagggccacgcccttcccagcttgctcagcggggtccttgctgctctcccatttgtagaaggcatcctctgatatcacctcctcgtcatacaggcaatcaaaaaacatccggagcaagtctgcaagaggtgacaacagccgcaggtgtgagcattntatttgcaaggaaaagcaaagacatgtgaattacngagtgactgaatgtggtcggtgaatgaatgaatgaatgaanggctgcagtcaatcagcacagtgaatgaacatccactccccagnactgtgcactacaccctcttgntgctgagcaatgtaacactcatttgcagacnaaacattactttttattcttatntttgcccaaattcaactatngtntggganactactcaaaggtgtttgttatttaa

SEQ ID NO: 289 - DNA, 106 bp, Homo sapiens
ctggaacccgagagactgtcgagcctgcacaccctggagctttgagggaaccagctggaatccacaaagggaatctaccttcctaagctgaagaatctctacctgg

SEQ ID NO: 290 - DNA, 525 bp, Homo sapiens
  misc_feature (1)...(525): n = A,T,C or G
caactggaagagattcgcctaaagcaggtaacagcaggagaacccaggcaccaagaagcgcaaggaaaacaaggagcagaatcagggagaatcggcgggggagaaaagccgatcccgaacagctactcgggtccttgccaccagcttggcatacaggaaccggaaccgggagaaagagctgctgccagtacaactggacactacgcagcctcaggacattntggaagaggaggagctcgagcggatgaagctcctgctacaganagagaacctcatccgcancctgggcattgtngagcagctcacccgcatgctgtaccctanccaccggagccacagaaagcttcatgagtatcgggngaggntccctgcgaagcctntcacaaagcaaggnaacaagggctgtgatgccaacacgtnnntggtggttttaaccaaangaggttatttgtgatggtaccttgtcacggnagcctgggaataggctctgctggnttccatgatgtcngttaccaggcttccttg

SEQ ID NO: 291 - DNA, 460 bp, Homo sapiens
agcacggacggaggaaggaggagaagctgagccaggcctatgcaatcagcgctggtgtctccctggagggccaacagctcttccagaccattcacaagaccattaaagactgtaaatggcaagaaaaaaacattgtagtcatggaagaagttgttattacacccccatatcaagtggaaaattgtaaaggcaaagaggggagtgcactgagccatgtacgcaaaatagttgaaaaacattttagagacgtggaaagccaaaagatactgcagcgttcacaagcccaacaaccacagaaggaggctgctctgtcatcctgagtccacaaacagggaggactcttccagcatccagccacagcgatggtggtggtggcttcagtggaggccggcccgggggagggaagggatcctatatttcctgctgactcttattagggtcagtgtttcaaaaaaaaaaa

SEQ ID NO: 292 - DNA, 275 bp, Homo sapiens
  misc_feature (1)...(275): n = A,T,C or G
tactgactcagctcgggactggccctttaagaaaacattcnttgctcgtcggtcccgcccggggcccgtaccctggacactttaaaaggacccagntagccctggaggcgaggngaccgnctccccgccctggccctgcgctgcgcagcgctgtggctcctgcccaagccggnccgtagagaagactggcccgcagcggntttctgcgcganttncttggatctcnccncaaangcgctgatagatgggacacgngnccaggctgcttttgctgc

SEQ ID NO: 293 - DNA, 333 bp, Homo sapiens
  misc_feature (1)...(333): n = A,T,C or G
ttatacatgctgttctcaagagatggaagagaagtncagcctgcaaagtaaagatgatttcaaaaccgtggtcagcgaacagtgcaaccatttgcaagccatctttgcatcccgttacaagaagtttgatgaattcttcaaagaacttcttgaaantgcagagaaatccctgaatgatatgtncgtgaagacnttttggccacttatgcgtgcaaaantnagagctatataaagatctcttcctttgagttgaagcgntactatntggcgggaattgtgaacctggaagaaatgttanantnacttnctgggcctcgccttctggcgcgcatg

SEQ ID NO: 294 - DNA, 427 bp, Homo sapiens
gactgaggacttgccttctgcctgtcgtctgaagagggaaactcttcgtaggagggctcaacttcaacaccgatgaacaggcacttgaagaccacttcagcagctttgggcctatctctgaggtggttgttgtcaaggaccgggagactcaaagatcccggggttttggcttcatcaccttcacaaacccagagcatgcctcagatgcgatgagagctatgaatggagagtccctggatgggcgccaaatccgagttgatcatgcaggaaagtctgccaggggatccagagggggtgcctttggtgggcgtggtcgcagttactctagaggtggtggagaccagggatatggaagtggaagatatgacagtcgtcctggaggatatggatatgggtatgggcggtctagagactacagtggcagaca

SEQ ID NO: 295 - DNA, 142 bp, Homo sapiens
  misc_feature (1)...(142): n = A,T,C or G
ccactgttggagaagaccagtcagggcctgacaggcccanaggcancctgctcactgcaggactgagctccaccagggaggtctgcttgggcaggagtcggnagagagcccagcgagaccccagcagcctcccgtttctcgt

SEQ ID NO: 296 - DNA, 451 bp, Homo sapiens
  misc_feature (1)...(451): n = A,T,C or G
gactgaggtggggtctttcangagcccagnctgggacagaaggtacccacggagggacactccgaaccgatcctgttgccctctcggntcccagagccggcagggggcccccagccgggaatcctgggggctgtaacaggtcctcggaagggaggctcccgccggaatgcctggggaaatcagtcatatgcagaactcatcagccaggccattgaaagcgccccggagaagcggctgacactcgcccagatctacnaatggatggtccgcacggngccctacttcaaggacaagggtgacagcaacagctcggcaggatggaaggtggtttgtgttagtgtaccaagtacagnggacagaatggaccttcacgtanacgttagagtgagggagcanatctacnatgngcggaggggccanactgaacanaagatgggacagcttgacccga

SEQ ID NO: 297 - DNA, 352 bp, Homo sapiens
  misc_feature (1)...(352): n = A,T,C or G
gactgagatcccgtgataatctcgcaggaacgatttccagcaacactgtgcacttggctgccattctgtcttgcttgcttgtccctcacaaacagtcagctgagcagcagtcttcaattccagatgccactggctctttgcacagactcaagagaagaccgaaagcattagngataaagccacattctccaagcttgcagcctngagatgagtggcctttctgcgaggcacatnaacagcgtgacttngaagagcanagcttgnatagagatntaggntcaacggcctnanctgacagaacagncaactggctgnaccgngttttgtgtgtgtgtgtgtgtgtgtgtgtgtg

SEQ ID NO: 298 - DNA, 256 bp, Homo sapiens
  misc_feature (1)...(256): n = A,T,C or G
ctggtggcggtgctgtntgngacngactgggctgaggacatgcccannctgaaggacctggccantgtggccttctgtgatgcacagtccactcaggaaatccatgagaaggtgttgaatgaggctgngggtgccatgatgtaccacaccatcaccctcaccagggaagacctgtttntnttcaaggcngtgagagtagatcgngcgaatcggtactggctacgacaacgtggacatcaaggctgctggcgagctc

SEQ ID NO: 299 - DNA, 507 bp, Homo sapiens
  misc_feature (1)...(507): n = A,T,C or G
gactgaggtggggcgcccgtgagactgcggctgcatctaccggcttcgagttcgcctactggatgaatatgaaaacgaagtggtcaagttctctgcctcacccaacccagtccttcagtggactgagaggagctgccgacaaggactaccatgatgtgatgcanacatctctaggttgctatgcctgaggactactccatgtgnggaggccaagccagacctganngcacacncttntggtccccacatcaaggtaaacggaggaggatctggagttcaaggtcatccccagctgtatactgacttcaaggccagcctgagctacatgaggccctgtcaaaaaagagagaatatccaatagaccaagcttgggatcataacaaaaggagaaagctacttataagaagacagggactttaaaaattttcttaatccggggctggagagatggctcancggntaagagcactgactgctcttccagagncctgagttcaattcccagca

SEQ ID NO: 300 - DNA, 393 bp, Homo sapiens
  misc_feature (1)...(393): n = A,T,C or G
atgttaaggtgcatggcggcctgctgcagatcttccccgagggtcggccagtggtagccaacatcgagccactctttgaccggttgctcattttctggtctgaccgacggaacccacatgaggtgaagccagcctatgccaccaggtacgccatcactgtctggtattttgatgccaaggaacgggcagcagccagagacaagtatcagctagcatcgggacagaaaggtgttcaagtaccagtatcacagccaactacacctacctaatggccagccccagagctgcgtggaccagcagcagctcctgcctcagtgcccgctcctttcctgccactgctgctgcttctggcttgcctctgtactgngtggngtggagggcactaagtatcac

SEQ ID NO: 301 - DNA, 322 bp, Homo sapiens
  misc_feature (1)...(322): n = A,T,C or G
gactgagggtccccctgaganaatgaagagtatccgggagaccatgaaggancaaggtgtcctcaaagactttctgaagaaccacaagtatgaccctggccagaaataccactttggcaagnttggngactacagtgtactctatgagcccatggcctatatggatgcttcctactatggtgagatcagcatcgggactccaccccagaacttcctggtccttttcgacactggctcctccaacctgtgggtgtcttctgtctactgccagagcgaggcctgcaccacacacacccgctacaaccccagcaagtcctccacc

SEQ ID NO: 302 - DNA, 370 bp, Homo sapiens
  misc_feature (1)...(370): n = A,T,C or G
gactgagtcaaatggcagcttgctcagtanctgccgaggcgctaggagttgccgaaacaggtccggaagctaccgagcgagtccggaagttgccgaaagggagcagcggggaaggaggatggcgnatctcatcgcaagacttcgagaggacgggatccaaaagctgtgtgatacaggagggccgaggagagttgccggactttcaggatggcactaaggccacgttccactttcggacgctgcacagtgacaatgaaggctccgttatagatgacagccgaacacgangcaagcccatggagctcatcgttggcaagaagttcaagttgcctgtgtgggagaccatcgtgtgcnccatgcgtgaggggga

SEQ ID NO: 303 - DNA, 227 bp, Homo sapiens
  misc_feature (1)...(227): n = A,T,C or G
gtgcttcacacacctgcttgnnttacctgncaggcgagaannctngtgnatggtanngagccngggaccangcagctcattcagngcntcagganntaaaacccanaatnctaccnagngtccccacttnttggggctccacatgncctgagatctaggaactgcctttgcctgcgccaaagctattccattaaaactttactgctgggctgcctcaaaaaaaaaaa

SEQ ID NO: 304 - DNA, 175 bp, Homo sapiens
  misc_feature (1)...(175): n = A,T,C or G
gactactggcagtattcgtgangtgattgcagaatggattgagctgncacatgcctgctgacctgtgaacttaactgctnatttccagacnacacagatggnatttgctccnangagccatttctaaacaggtccacttcccctgtatcctttcttttccactacttctggtggg

SEQ ID NO: 305 - DNA, 260 bp, Homo sapiens
gactgaggtggggtctttcacattttcgagctgagaccttgatcggctaacttagtcaaaataccactgccaccgctgaaggaccaggtgttcgaatgcacagtgttgcaagcaacgcaagcgaaagtgaccctcacacacacagccctctgtgtccttttatggctgttctgtcgtcgatgccaacccccaattatttattattgttaataacttactttttcttacattctgttgtaaataaagtatgaagcaatctt

SEQ ID NO: 306 - DNA, 186 bp, Homo sapiens
tcgggatgtttgacggctatgatagctgcagtgaggacacaagtagcagctccagctctgaggagagtgaagaagaagttgctcctttaccttccaatctcccaatcatcaagaataatggacaagtctacacatacccagatggtaaatctggcatggctacctgtgagatgtgtgggatggtcg

SEQ ID NO: 307 - DNA, 310 bp, Homo sapiens
gactgaggccttaagtattcttcaaagagtcccccagtagtggtgatcacagacatgaaaagatgcgagacgccgcagatccttcaccaccaaacaaaatgttgcggagatctaatagtcctgaaaacaaatacagtgacagcacaggtcacaacaaggccaaaaacgtgcacactcagagagttagagaaagggacggtgggaccagttactctccacaagaaaactcacacaaccacagtgcacttcatagttcaaattcacattcttctaatccaagcaataatccaagcaaaacttcagatgcagg

SEQ ID NO: 308 - DNA, 398 bp, Homo sapiens
  misc_feature (1)...(398): n = A,T,C or G
atgttaaggtgcatggccggcctgctgcagatcttccccgagggtcggccagtggtagccaacatcagagccactctttgaccggntgctcattttctggtctgaccgacggaacccacatgaggtgaagccagcctatgccaccaggtacgccatcactgtctggtattttgatgccaaggaacgggcagnagccagagacaagtatcagctagcatcgggacagaaaggtgttcaagtaccagtatcacagccaactacacctacctaatggccagccccagagctgcgtggaccagcagcagctcctgcctcagtgcccgctcctttcctgccactggttgctgcttctggcttgcctctgtactgggggggggnggagggcactaagtatcact

SEQ ID NO: 309 - DNA, 159 bp, Homo sapiens
  misc_feature (1)...(159): n = A,T,C or G
gagcacaggcggcagttggttctccatcctcngtgagccctggagcatgtncccactgcgagccttcagncatgccgntctgcacgcttctgtctccaacaagtggagccaatgagtcacaccccaggggggctngaggcacccatcaccaccagtgca

SEQ ID NO: 310 - DNA, 250 bp, Homo sapiens
  misc_feature (1)...(250): n = A,T,C or G
atctgagacctcgtctgcaaacagcataagcagcagtacttcttcaaaccacagcggctacactccagagccccctctgctcccagctggaggcgaccttgccagccgactgtccagtgatgaaggggagatggacggagccgacgagtccgagaagttagactgtcagttctccacacaccaccccagacctcttgcgttctgctcattcgggagtcgcctcatnnnacgaggatactatgtgtttgat

SEQ ID NO: 311 - DNA, 145 bp, Homo sapiens
  misc_feature (1)...(145): n = A,T,C or G
gggacatgggttggaggaccctgccntccagacgccaggaagaggagactacnanagacctggctctgaaatnaccaccagggaaacctggaggtctcctgcccagcattgatganacccgacctataggcccaggcccagcctc

SEQ ID NO: 312 - DNA, 110 bp, Homo sapiens
  misc_feature (1)...(110): n = A,T,C or G
gagcagtttgcctaatgccagagcgggggaagatgctgagtgcacaagatcaacantgagaacaaagccctggacttcntcgccagcaggggaaacaagctggtgtccat

SEQ ID NO: 313 - DNA, 245 bp, Homo sapiens
  misc_feature (1)...(245): n = A,T,C or G
ttcctcacccgccagcttttgcctgaccttacaagcttctgagatgaanaacccggaggaagcggcagacgggaaacagctgtattcncctgcgccctggctcgctgcgtggttgcctgaccggctaancatgcacctnctgcnctgcgacgttctantntgcntggctcggtcncggtagatcgcttnttcncgncccctngnncnccacgatgcataacgggctacagggcgtcgtttcgcgg

SEQ ID NO: 314 - DNA, 489 bp, Homo sapiens
  misc_feature (1)...(489): n = A,T,C or G
tgacgctcctctcttcccagtcttcatccctggcagccccctttgggtctgtgtccactgaaaacccagagcagaggatgctggagaagagagccaaggtggtggcggagcttttgcagacggagagagactacatccgggatctggagatgtgcattgagagggtcatggtgcccctgcagcaggcacaggtaccaaacgttgattttgaaggnntttttggaaatatgcaaacagtgattaaagtctcaaagcaattgttggcggccttggaaatcagcgatgctgtaggacccgtgtttcttgaccaccgagacgagcttgagggancgtacagggtttactgccagaaccacgatgaagccatctccctgctggaaatgtacgagaaggacgagaagacccagaagcaccttcaggactacctgggcagatctcatgagcctgtaccacgaatggggatgcncccaattacatcaacctggggct

SEQ ID NO: 315 - DNA, 331 bp, Homo sapiens
actgagggtgacctgtctgtgtgcccagtttgaagccgtccttcagcatggcatgaagaggagccgaggattagcactcacggctgcagccatcaaacaggcagcaggcttcaccagcaagaccgaaacaggagcaagggggctggtgagatggctcagcaagtaagagcacccgactactcttctgaaggtccggagttcaaatcccagcaaccacatggtagctcacaaccatccgtaacgagatctgactccctcttctggagtgtctgaagacagctacagtgtacttacatataataaataataaataaatctttaaaaaaaaaaa

SEQ ID NO: 316 - DNA, 499 bp, Homo sapiens
  misc_feature (1)...(499): n = A,T,C or G
gactgaggactttaagctcgacttcggcaatttccaaggcaaaatgagtgagaggtggcacggaggcatnantgncatnnttgnganncctntntncnaatanganattnagggttctnctcaataagcggaaggaaattacctgccnnngttacctgatgacgaactacnagagcgcgcccncatcaccacagtataagaaggttatctgcatgggtgcganaganaacngtttgccacaggantatcangaganattaaaagcnatanaaccaaatgagtatnaaggaangatctccgacgaaatggaagacatcatcaaaangggagagtcanaactgtcataacagactctgaagctntgtgtgctattatgaagtgcttttaacgtttgcgaacangagtctggaccttcttggttctgaccttgattttcaacagtgctgnnaagggcttctcacataggtgattctttatttttanctgtaacaaacaactg

SEQ ID NO: 317 - DNA, 381 bp, Homo sapiens
  misc_feature (1)...(381): n = A,T,C or G
gactgaggactatgatgtttgtctgtagcccangccgacctcnangntntccggcctcanggccccctgagtaatggggatgggaaggcctggaacaccacacccagctgacgctnctcaaggccttttcatagtctccaagccttgaaggtttacaagaagaaagcaggcnaccagatncgcctgtctctgcccacaagggctggcattaaagatgtgtgccgccatgcccagtgatcccagtttaaaagaaaaagacaagattccgattgatanaatattaaannaanctnagntgnctgtgcccactatggaacaacctnanactgagaacccagcccctagtaaggccactagtgcanaaactgtttttttaatgcc

SEQ ID NO: 318 - DNA, 390 bp, Homo sapiens
  misc_feature (1)...(390): n = A,T,C or G
actgagctaacaagcagancaccagcnggtcagtatttggatggcttcacttgacagtacttntctttgaagnccactgggntcatctgcagagcttcacctacctcatccactggaagaaaatgtcaaggcattcaatcaagctttggagataatcagttattaagcatacagctgaatccttttaaaaacacatatcacttacatggtatgttgattgatccaggtatttttccttgctcaagaatttcccatgtatttctaacatcaattaacataatgtctttggagttcagtaggctttttagttccctataagtcacacccttaggagtagaacaaaatgcttggctgcatctccatattgacttcaaacctgaaagaaataag

SEQ ID NO: 319 - DNA, 489 bp, Homo sapiens
  misc_feature (1)...(489): n = A,T,C or G
gactgaggctagatcttcagaactgttccctgaggatcctggtccaaactttttacaggcttatactgctattatcatagaccttcaggcaaatcctctcaaggatgatttggccaacaccttccgtgggtttactcagctgcagactctgatactaccacaagatgttccctgtcctggaggtagtaatgcctgggacaatgttacttctttcaaggacaagcagatttgccaagggcaaagggacctttgcaatagcactggaagcccagaaatgtgtcctgagaacggatcttgtgcatctgacggtcctggtcttttgcagtgcgtttgtgctgatggtttccatggatacaagtgtatgaggcagggctcattttcactgcttatgttctttgggattctgggatccaccacgctagccatctncattctactttggggaacccagcgccggaaagccaaggcttnatgagccacacaagactt

SEQ ID NO: 320 - DNA, 334 bp, Homo sapiens
  misc_feature (1)...(334): n = A,T,C or G
atgctcccaaacctgggaactgggacagctccgatgcctggggctccnggacagacggaactagcgctcanaggaacagcagctgccaacanctgggacacgggctttggccacccacaggcctaccaaggaccagnanctggtgatgatgacnaatgggatgaagactgggacgaccccangttcttctcaccttacttgagggattcagaaccagctgaagcagggggcatccagnggggaaacagtcgtgcgggtgcctcctccatgaagctgccccttaacaaatttcctggatttgcnaaacctgncatgnagcaaaactttgttggcc

SEQ ID NO: 321 - DNA, 141 bp, Homo sapiens
  misc_feature (1)...(141): n = A,T,C or G
ccctgggagtctgctatggnnttccctcacctacaacagcnnagtttncttntggctagcctgaaagctgacctctataaataagccctttgcacaacgttcgccaagattncggtgaangtcattgaggattttccagcc

SEQ ID NO: 322 - DNA, 445 bp, Homo sapiens
  misc_feature (1)...(445): n = A,T,C or G
tgcccggtggagctgtgtagcctccgttccctgcgggatctcantgntcgaaggaaccagctcantaccctgcctgatgagctgggagaccttcctctggtccgcctggatttntcctgtaaccgcatntcccgaanncccgtntacttctgccgnctnaggcacctgcaggncgttctgctggatagcattncccctacagaggccacctgcccagatatgcctgaaggggaaacttcacatcttcaagtacctaacaatggaagctggccggaggggagccgccctcggggacctggtcccttcccgccccccaagttttagtccttgccctgccgaagatttatttccgggacgtcgttatgatggaggcctggactcaggcttccacagcgttgacagnggcagcaagaggtggtcagggaaaatgagtccacagatgatt

SEQ ID NO: 323 - DNA, 353 bp, Homo sapiens
  misc_feature (1)...(353): n = A,T,C or G
gactgaggtgtaacacccaggnactacatctggcacaagggggatgcgctgtgagtccatcatcacggacttccaggtgatgtgcgtggccgttggctcggctgctctcgtgcttctccttcctgttcttgatgactgtgttctttgccaagaanctctatctngctcaagactngagaatacncaagcttggggaggacnnnntaaaaaccnggaccccgtctgagctncncaanngacaanntctncctcnccaccattggncgagggngtnttcanccgnaatagacagagcccngcgctccccacaaaatncagganccctctcaagtnccgcctgaaggagggaagaa

SEQ ID NO: 324 - DNA, 289 bp, Homo sapiens
  misc_feature (1)...(289): n = A,T,C or G
gagaacacactggtagcaattttaatgtacacatgcaagaacaaaagcctgtgaagctggaacgcaactgtaggttatgccactaacttagccttaatgaatgaaatcgtagttcagcggtggaggccctgcctagtacctgccgaggccctgggttctgtctccagcactacaagctacatacaggaatttattgaacttaggacttcttcgtgcatgctaagnnngtcctctcccaactgagccacatctccagttgcttaatgaatattaaggaacaaaaaaaaga

SEQ ID NO: 325 - DNA, 204 bp, Homo sapiens
  misc_feature (1)...(204): n = A,T,C or G
aagggcagagacttgatcatgcacttacacagngcnagacttcacattgnanggaagcctttggtatggnatacctgtnacctgctcatcatagcttgacnncanntccagcggagcnnanagacctttgtgccaancctatgtgagtncttcaggccaattcatctctgngcaaagacctggncctgccctgccactttgtgc

SEQ ID NO: 326 - DNA, 115 bp, Homo sapiens
  misc_feature (1)...(115): n = A,T,C or G
tactgtaggatactcggggaagacanccacagntgtgtnaaaggggaacccccatcaaatgcgggcagnccatccgtntgacacacatcaacanaggtngaagcctgcacagacc

SEQ ID NO: 327 - DNA, 317 bp, Homo sapiens
  misc_feature (1)...(317): n = A,T,C or G
tgagtgagaaggccccagggatggcgctttttttaagggacctgcgtatcctgggtaccccttcctnntgattccagacctnagcngcccgtacctctccaacggacccctgtctcctggtggagcgcgcaccgtctnacatgatnntggagctcantcntgcaatancanattgcagctgctaacatcagnagactgcttggctgccaanaactaggatntaagangtgcnnntnangnctgnagagatggctcagngnataagactgntcttacataggcnctgagnncaaatccnagacaaccacatggtggat

SEQ ID NO: 328 - DNA, 444 bp, Homo sapiens
  misc_feature (1)...(444): n = A,T,C or G
gactgagccccgttccttgtggactgtccagngtgctggcaaacccaggaaacagtcaggttgccagagttgcagctggtctacaaattaagaactctttgacatcgaaagatccagatatcaaggcacaataccagcagaggnntcagctattnatcgcttntgntctacgtggaagtcaacganntntnnnctttggaagccagaagagagtgttgattcccctggatntggagttacacgccatcgtgnggatcagacaagggtgctgngaactgaactctttggagagnagggagggttatgctgttttgctctccccaacacagtcccacagctcccctttgttttagggatggcaggtcctgttgtttgctggtttttacaggataatgtgtaaagtcagggangataaataagtaattttgagtcaaacaaaaaaaa

SEQ ID NO: 329 - DNA, 507 bp, Homo sapiens
  misc_feature (1)...(507): n = A,T,C or G
gactgagacccaatcccaccttctcacagccaagtgccaatggagtccagacagaaggccttgactatgacaggctgaagcaggacattttagatgagatgagaaaagagctggcaaagctgaaggaggagcttattgacgcaatcaggcaggagctgagcaagtcgaacactgcataaagaagcaaactacggaggggcaggacttgaatctggagaaaacaaaaattcctacaaacaactcttaacccccaaacttttaagctgtaagaagaaaatggatacacagtcaggagggaagccgtcaacctctgaaagcctcagacagtgactctggcgatcagctgtcccctcagtgtgctgctttattctgtctgacctttaccacaggatggagaatgatattggagttcccttagcagtactaaacccgtcaggcaagatcaccgngcattgaaatattttcatgtctagatgantctgcacgttntccataatccattgctaa

SEQ ID NO: 330 - DNA, 500 bp, Homo sapiens
  misc_feature (1)...(500): n = A,T,C or G
tgagcgctggcgtggatgctgccatcgcctggtctttgnngactcggctgctttttaatggcngcagcggctgnctgggangaacanctagagacnannagtttgntntgacggnagggttgcttttgcttggcgccatcactgntggattggcccttcctggcccttnctctgttagaagggagaagatgccactgccattnggattgaaattgaaacgcacccgacgctacactgtgtccagcangagctgcctgggtgcccggatccagctgctcaataatgagnttgtggagttcactctgtcngtggagagcactggccaggagagcctanaagctgnggcccagcgcctggagctgagagaggtaagctgcaaaggaggctgcaggtctttttttcttcactccttacctcatggaggctgngtatcctacctagtctacctgacaccagaagcatgcacttcctgtctgtgactgcagatgaacctgaagccc

SEQ ID NO: 331 - DNA, 420 bp, Homo sapiens
  misc_feature (1)...(420): n = A,T,C or G
tgagccctgtcagaccccggagtgatgtgacccacaagcagctctcagcatttggagagtatgtggctgaaatcttacccaagtatgtccaacaagttcaggngtcctgccttgatgagtcnagaaatctgtatccatcccgatggagtcatcccaacgctgacttttctcagggatcacaccaatgcacaattcaaatccttggctgacttgacggcagtggatgtcccaactcggcagaaccgntttgagattgtctacaacctgctgtctctgcggttcaactctaggattcgtgtgaagacctatgcagatgagctgacacccattgactctatagtgtctgtgcaccatcgcggcccaattggtatgaggagggaggtctgggacatgtttggagttttcttttttaaccaccct

SEQ ID NO: 332 - DNA, 254 bp, Homo sapiens
  misc_feature (1)...(254): n = A,T,C or G
atgtgatgaacaaggacgagaaagcacagcanccactggtgcttagcntgatataggaatanacnnggatgnccgacaggctttccatgtancatggtgnttagttttgccagggctgctttgtgaagaagaagggantggtcannacantgggtcantantgtggcnactgtnaataccacttnagaaggctgaaaaagacaaacggggatntattaggttatangancaaaagnttaagtgacttcttcctt

SEQ ID NO: 333 - DNA, 131 bp, Homo sapiens
  misc_feature (1)...(131): n = A,T,C or G
tgagagtctctgcaggaggtatcacccagnngggcagatcatgctggcagcaacaggggtggccagtatttgtcccagcctggggcttcctccctggtttcttatttgcagttacttgaataaaaaacaaa

SEQ ID NO: 334 - DNA, 298 bp, Homo sapiens
  misc_feature (1)...(298): n = A,T,C or G
gaggaggctcaatggccctgagtgaagatgaggctgaggcagaagtgtctgncaacacaaaggtcccatcctgtggcaggtggaactctgggaagctgctgccctcagggcttgaaccagatcagcccctacatctgggtgttgagggggggccactgtggagggctgaagctgaccctggntgcatcttttttagttttcttgtcacngatccatactgccagcaaagaaccagtancagataggtctaagcctnccctcagagncccgctttnttctggccagtgtagggcactgg

SEQ ID NO: 335 - DNA, 268 bp, Homo sapiens
  misc_feature (1)...(268): n = A,T,C or G
gagaccatgaaggaacacaggctgncactcanagacttnctgaaganccncangtctgancctgancagaaataccactntgggagggtnggtgnctacaagtgnactctatgagcccatggcctatatggatgcttcctactatggngagatcagcatcgggactccaccccagaacttcctggnccttttcgacactggctcctccaacctgtgggtgtcttctgtctactgccagagcgaggcctgcaccacacacacccgctac

SEQ ID NO: 336 - DNA, 451 bp, Homo sapiens
  misc_feature (1)...(451): n = A,T,C or G
gactgagacgtgatggtgtggtccaacgaacgggtcatgggttgggtgtctggtcttggcctgaaggaatttgctacnaatctcacggagagtggggtgcacggngcactgttggctctggatgaaaccttcgactactccgatctggccttgcttctacagatacctacgcagaatgcacaagntnggnaactgctggagaangaattcantaacctcatntccttaggcacagacagacggctggatgaggacagtgccaagtccttcagncgctccccatcctggaggaagatgtncctgcgagaaggacctccggggtgtaaccccngattcaaccnagatgttacccccctacttttgctcanttgccgnaggagccctacgctctcccggncttnctntccgcnaaactgcagcctgaaggccagacttctgggagttagcaagc

SEQ ID NO: 337 - DNA, 445 bp, Homo sapiens
  misc_feature (1)...(445): n = A,T,C or G
actgaggaaacacaggatgagtcagctgtgttatggttggatgaaattcaaggtggaatctggcagtccaacaaagacacccaagaggcccagaggtttgccttaggaatctctgccatcaatgaagcagtagacagccggtgatgttggcagaaccctgagtgccctacgttctcccgacgttggcttatatggagtgatccccgaatgtggggaaacgtaccagagtcgaccttgctgaagccaagaagaagagactggcagnaggagatantaacagnaagtgggtgagagcactgggtgaaaggngngtaccattactaccacaacctgnagacgcaagcaggaggatgggnagagccncnagactttntgcaaaattntntgcancttttatngagangggatccagagntccanctctggagtaacccgctgcatataa

SEQ ID NO: 338 - DNA, 510 bp, Homo sapiens
  misc_feature (1)...(510): n = A,T,C or G
actgaggggtgaacatgatgatgaggaagatcgctgtggctgcagcctccaagccagcagtcgagatcaaacaggagaatgacactttctacatcaaaacctccaccactgtgcgaaccacggagattaacttcaagatcggggaggaatttgaggagcagaccgtggatgggagaccctgtaagagtttggtgaaatgggagagtggaaacaaaatggtgtgcgagcagaggcttctgaagggggagggccccaagacctcctggagccgagaactgaccaatgatggagagctgatcctgacaatgacagcagatgacgttgtgtgcaccagggtctacgtccgagagtgagtgcctacgggtccaagaactgcctgagacgacttccgtgcccgctacaggacaccaaacctccctcccacgtncatcttacaaactanctctccccttactcctgagggttactgcttcctccaaggccttttgttcttttgccttctctaagcca

SEQ ID NO: 339 - DNA, 429 bp, Homo sapiens
  misc_feature (1)...(429): n = A,T,C or G
ccatgagcgagctgaaagacngtaccactgcagttncatgacttnaagnctgtggaccacctgaaggtctgtccccanntacactggcagtgctggcccgctccgaggacgatggcattggcattgaggagctggacaccctgcagctggagcttgagactctgctgtcctctgcaagccggagactgcgtgtactggaagctgaaacccagatccttactgactggcaggataagaaaggggaccgacgattcctgaagctaggtcgcgaccacgagctcggtgctccccccaaacacggaaagcccaagaagcagaaactggaagggaagacaggacatgggccaggccctggcccgggacgacccaaatccaaaaacgtccaacccaagatccaggaatatgaatttactgatgacccaatcgacg

SEQ ID NO: 340 - DNA, 304 bp, Homo sapiens
  misc_feature (1)...(304): n = A,T,C or G
gccgggcgccgcctctagggccacccanggctcttctacatgccattatcccaccaagctncagggggcagacagcgacccttctgggcagctggnatcgcgactggttgcgtncctgactcggtccaatcatcggagagccgacgctttctccttgaggaagtgactgcgctcggaacctagtgggggccggngggagngatgngnncgnngagnnnctgagtcgatggtagtgtgcgcctggaccaccganactctggactagnctctgntctcttgtggccaagngtggctcgtgtacaat

SEQ ID NO: 341 - DNA, 538 bp, Homo sapiens
  misc_feature (1)...(538): n = A,T,C or G
gactgagtgtcttaaaacataatgggtgaagacgaattggcactcttaaatcaaagcatcaatgaatttggggataagttcagaaacagactcgatgataatcatagtcaagtgctgggacttagagatgccttcaaggactccatgaaagcgttttcagaaaagatgtctttgaaattaaaggaagaagagaggatgactgagatgattctggagtataaaaaccagctctgtaagcagaataagctcattcaacgaaaagaaagagaatgtgttgaagatgattgctgaagtaaaaggcaaggagcaagagtcggaagagctgactgctaaaatccaggagctcaaggaagagtacgctaggaagagggaaaccatttccactgctaacaaagctaatgaagagagattgaaaggactgcagaaatcancggatctgtatagagattaccttggactagaaattagaaagattcacggtaataaattgcagnttatatttactagtattgaccctaagaatcctgagagcccatat

SEQ ID NO: 342 - DNA, 511 bp, Homo sapiens
  misc_feature (1)...(511): n = A,T,C or G
tgctaggagcgcggggnccagcagcagncccataccccnttggatcgtacattctanaagcgactgcccgtggagatgctaatgaaagccatcntacagtaaagcaacatgtccttntttnctngggaccagactgaaggaaggggcgggagagaggcaggtgcaaggcngtgggcgaggcaggcttcacaagcnggcngacggagttnccacaanctntacccaggganatccccaccctgccccatagggcccattcgggatcaactccatntcaantgtangtcctctggcacagccanctgtgcctgtagcgaactccgccagcacattttcgttntncgacagcagcctcacagtgagctcatacaggctgcccgcatccgtgcgacccgagtacctgcaggggagtgggagacacagacctcacctgntgagagagcctcactctgccagagatctcttctgcctatcccagcatncctgccgggcaagtgcaccccccccagca

SEQ ID NO: 343 - DNA, 508 bp, Homo sapiens
  misc_feature (1)...(508): n = A,T,C or G
ccactgatcttcagcacgntactttgcttgcttgatgagagcccggttngnagaacatnagaatgagaaggatatgatgagggctacccagctgctgagggaggcagaagaagaattctggcagaatcagcatcctcagccgtatatcttcccagactctccggggggcacttccttcgagagatatgagtgctacaaggttccagaatggtgcttagattactggcatccctctgagaaagcaatgtatcctgattacttttccaagagagagcagtggaagaagctgaggatggagagctgggatcgggaggttaagcagctgcaggaggaaacatcacctgatggtattatgactgaagctttgcctcctgccagaagggaaggtgacttgcccccactgtggtggcatattgtgaccagacctcgggaacggcccacatagaggcaggcccctcactgttcatgcttgcaagtgagagtttcagagcacgctcacacttgccct

SEQ ID NO: 344 - DNA, 514 bp, Homo sapiens
tgaggacttggtgacttacttcttgacctgaggcaggcgaatgtacaagagaccccacggtgggagcaggagtaccgcctgacggaggcctaccaggtgccggatgccagcgtcagctccatgcacacggcgctgacccgcattgccagtgagcctcacatcctgcaacgttattacgtctataactcggtcagctacaaccatttgacctgtgaggacagctgccgcatcgagcacgtttgtgctatacaacacgtggctttcaacacttatgctacctgcttgcatggtcttggtgccaagctggtgcctggtttcctgctcatactgactctgctgccaagcctgcacgtactggaggtgttatgactgtaggcactgccagcccacccactgacttggttcatctttctcctggtaaaattgggcaacgttacccaatggagagagatgaacttttgccatcagtctccccccgcggagagtaaagtgggatgggacacctggattcacc

SEQ ID NO: 345 - DNA, 484 bp, Homo sapiens
  misc_feature (1)...(484): n = A,T,C or G
actgagtggaggagtctggagacaacaggcanggaaagggcatctccctaggggaaataaaagaaggaagaacaagtcatcagccgaggacctcaaatggntgaaaaacagaatgtatttggtgtctgctgtatctttgcatccttcagtgaaacctttgtccacatcactactctttctggcaaggaaaccctctgctgagtaactattataaagatgaaggttgattgaggcatgtggctggctagcatgcagttacagaggactggtgatcaaatccaagacttcacgaatgccaggcaagtactactaactaagctatatccttaacaaaaagattccttttctatatagattccaaataagaatgcttaaatagcaatcaagtatgctgaagccctggacgcacatgattttactcccctaaatggaagcctacaatttctgagaatcccaaaaataaaaactcctgtacaacccttgc

SEQ ID NO: 346 - DNA, 466 bp, Homo sapiens
  misc_feature (1)...(466): n = A,T,C or G
actgatcttcagcaaaatgaccctgcantgcaccaagtcagctggacactggangatggtggngtcggatgaagaaaggcttcctgggccgnaggcatgaattcacagccgagtgtcccagtgtccttggaacttggttttgagacggtgcgatctctnaaagtcntgagcgnagcgagggtaggctntnagcacnccngatttccaaggacagcaatatgtgcttgnataggggcgattacccgngctgncatgcctggggtggcaacacaagactaccctgcngagaggctcanctccttccggnctgtggcctgngctaaccnaccgcgactcaaggctgaccatcttctagcaggagaacttcctggtgcagagaaaggctgagctgaaccnatgactattncctctcttgcnggccatgggcttgggacggcacttgangggggcctcctttccatgttca

SEQ ID NO: 347 - DNA, 521 bp, Homo sapiens
  misc_feature (1)...(521): n = A,T,C or G
aactgagctttctgcctgtgaaaacacttaagaatcatgtctctgcatcagtttctgctggagccaatcacctgccatgcctggaacagggatcgtacccagatcgccctgagccccaataaccatgaggtgcacatctataagaagaatgggagtcagtggacgaaagcgcacgagctgaaggaacataatggggcatatcacaggtattgactgggctcctaagagcgaccgtattgtcacttgtggggcagaccgcaacgcctatgtctggagtcagaaagatggcatctggaagcccaccctggtgatcctgaggattaaccgtgcagccacttttgtgaagtggtccccacttgagaacaagtttgctgtggggagcggagcccggctcatctctgtctgttactttgagtctganaatgactggtgggtgagcaagcacattaagaagccgatccgntccacagtccttagcttggnctggcatcccaacatgnttttgctgcttgaggctcctg

SEQ ID NO: 348 - DNA, 460 bp, Homo sapiens
  misc_feature (1)...(460): n = A,T,C or G
ttgtactggcccattcanagaagacatcattcaactacnccatgaaggaggctgctgtngaggctctgaagaagagaggatgggaggtactcgaatctgacctctatgctatgaacttcaaccccatcatttccagaaatgacatcacaggtgagctgaaggactctaagaactttcagtatccttccgagtcatctctagcatatnaggaaggncggctgagcccagatattgtggncgaacacaanaagctggaagctgcanacctggtgatatttcanttcccattgcagnggtttggggtgccagccattctgaaaggctggtttgagngagngctcgnagcaggatttgcctacacatatgctgncatgtacnacaacggtcctttccagaataagaagaccttgctttctatcaccactgggggtatgcggctcnatgtactctcttcagggtg

SEQ ID NO: 349 - DNA, 407 bp, Homo sapiens
  misc_feature (1)...(407): n = A,T,C or G
aggggtacctgactagatggaggatgctcttgctgcctgcncagaannggncacgagtacatgggtgcagtgaccaaagttgacacatcccgtcccagaggaccactcctcagcacagtgtcacagacccagggccacaatgcagnnngnctgtggaggtggntgagaccatatgatgtggangtgtactgatatctccctcttttttttttnnatttgtangtnnntctnannggatnatnccntttcacttngttcanaactncaaaggcacaaaggttgttcggtggagtttgtacttnccacctctcgtnttggacacctggttcttccaggctgctgtgcatgctaggggagagtttgagtagaccagggtgaggaagcangcgtgaactgctaacagcaca

SEQ ID NO: 350 - DNA, 400 bp, Homo sapiens
  misc_feature (1)...(400): n = A,T,C or G
tgaggacgatgctgtcagtattgagagtggcacaaacacagaacgcccggacacgcccacaaatacgccaaatgcaccaggaaggaaaagctggggaaagggaaaatggaagtcaaagaaatgcaaatattctttcaaatgtgtgaacagcctcaaggtatgtgctaggaagctctagacttcanacttctctcagggcatatgggatacccttaggnctaanctattttaaaactactgttttaaaggggtttctgtttgtttaagttgactattctaatctgncacacagttaatcaagtgagctttgtttatccttgttctttactttgaatgtataatagtgagtattgtaggctgttcttgacttatttgttgatccaaataaaggactttaaga

SEQ ID NO: 351 - DNA, 386 bp, Homo sapiens
  misc_feature (1)...(386): n = A,T,C or G
actgaggtttatttatgagnacactgttgcagtcttcatacacaccagaanagggctgtcagtatcccattggagatggttgtcngncaccatgnggttactggaaattanacctttggaagagcanncagagctctgagccatactctccagcccgaaagctgacnttattacaggnnaaccgttatgttacttctccgatgcaattgctganttataaactatanagaagatggtgaggccnacaggtgtncanggtgnntcaaatctttcagtcctnttaagcctcactcctagaactacaactncngtaagggtccaccntcctcgcccaaggggcggngcctnacgcaaggagaaagaccacaactcccagagaagctccg

SEQ ID NO: 352 - DNA, 383 bp, Homo sapiens
  misc_feature (1)...(383): n = A,T,C or G
ccaagactgccctttggtattcaaacgggcagccgctntggactgantggctgncttcctcctcctccccctcctcccccttctgcttcagatttatttattanatagnacagtacacatggagcaggngtnggacacactagacgagggcaccagatctnattgtgggtggatggatggggtgtnnntttactttgangataacgcatnngncanagnatncaannncggagagatcgaaaggctctgctatcacaggcncaagtggcaaaggagtgngcatgacttgaggcccagaattgcatccaacacaacgcagcantgcttgattctccagggnatttgtaaaatatattcattaaagcttctgctctgaaaaaaaa

SEQ ID NO: 353 - DNA, 362 bp, Homo sapiens
  misc_feature (1)...(362): n = A,T,C or G
cggaccattttcgaataccaccgtgtggaactggactccagcaagatcaccaccacctcggccgtggagttcaccccgttgccaacctgcctccagcatcagagttgcgacacctgcgtgtcctcgaatctaaccttcaactgcagctggtgccatgtcctgcagaggtgttccagtggctttgaccgataccgccaagaatggctgacctacggctgtgcccaggaggtganctntgtgaatggnctgctgttgcnngtggttggaagtttgtcatgcttcaggantatanccttgataatgtttaangnggacggcnntnccttgtgactagctttttcantcactttcatcaccaaata

SEQ ID NO: 354 - DNA, 517 bp, Homo sapiens
gactgagggcgagcggaagtggacgccctcctccgtcacctcggacagggagaagagggacaccatctggaagccgccgctatcctggggagaccccgcagcgaagctgtcaggagattgagactggggacctctcacctcaacgcagcgcccgagggcggcaaccccaactcaccgtcagcagattgtggggccaattcatgaagccgtgaagaccctgggctttccggatcagctccggtccctgtgagggagaaaaagttagcggtgcccgcagctccacggccaggtgtgggtgagccccggcactgtgggccttactcaacagacttttccaaagaccccctcgccacccaccccccagatcgaatccacacaccggcctcagccccagatggtaggtgttgcccaagcagatgcggcagcccagggagtccagctgctccgtggtgatacccttcatggtggcctgtgtacccacaggcatgaacacaggggtggctaccgttccatgcgg

SEQ ID NO: 355 - DNA, 342 bp, Homo sapiens
  misc_feature (1)...(342): n = A,T,C or G
aactgagcaagcagggatgcacagtcactgtgtctgatttatatagcatgaactttgagccaagggccacaagaaatgatatcactggtgccccctctaatcctgacgtcttcagttatgggatagaaacccatgaagcctacaagaagaaagctctgaccagtgatatatttgaagaacagagaaaggtgcaagaagctgatcttgtgatatttcagnttccactatactggttcagcgttccagcaatcctaaaaggttggatggatagggtgcttgtgccgagggtttgcctttgatatcccaggcttttatgactctggttttctcaagggtaaatta

SEQ ID NO: 356 - DNA, 311 bp, Homo sapiens
  misc_feature (1)...(311): n = A,T,C or G
tgagtggacagaagattgcagaaaatcaacgtatcctccttctggaccaacctatagaggaccagttccgtggcacaccataaatcttgatttaccaccctacaaaagatggcatgaattattggctcaaaaggcaccagcgttgaggattttagtgaattccataacgagtttagtgaatacatttgtgccaagtggaaaactaatgaagatggtggatcanaagctgnctggtatgattggcagccttcctgacccttttggagaggaaatgaggggaattgcaaatgttactgggattcctctaggaa

SEQ ID NO: 357 - DNA, 289 bp, Homo sapiens
  misc_feature (1)...(289): n = A,T,C or G
tgagggacacaccgcaagataccaacacttactttctttgccggaccctgcgctccctgggggtccaggtttgccgagtctctgttgtgcctgatgaagtanccaccattgcatccgaggtcaactcattctccaggcgcttcactcacgtcctcaccgcggggggcatcggccccactcatgatgatgttacctttgaggcagtggcacaggcttttggggaggagctcaaaccnnggnctgagctccaagcagccatcaaaaccctangaggggagggttgggagaa

SEQ ID NO: 358 - DNA, 253 bp, Homo sapiens
  misc_feature (1)...(253): n = A,T,C or G
cactgaagacgactgttccgttattgggaagtaatcagcttttgaaactgagagtgttgggaaggatatacttacgtaatggagctgtcttnnncgagagaccagcctgcgtcctaaagtttgctttanagagtaggaatgtcggggttnccagttagaaaacctttatttntggaaacggaataaaaatctcttagaaacttttgcagataatttgangttgggcaaatatatataattattttttctgggt

SEQ ID NO: 359 - DNA, 246 bp, Homo sapiens
  misc_feature (1)...(246): n = A,T,C or G
cagcaactttgagcaggtgatcctggggctgatgacacccacagtgctgtatgacgtacaggagctgcnggagggccatgaagggagctggcacggacgagggctgtctgattgagatccttggcctctcgtacccctgaggagatccgtcgaatcaaccagacataccagcagcaatatggaaggagccttgaagaggacatctgctctgacacatcccttcatgttccagcgagtactgggtgt

SEQ ID NO: 360 - DNA, 223 bp, Homo sapiens
  misc_feature (1)...(223): n = A,T,C or G
ctaccctgcggagaggctcanctccttncggcctgnggcctgcgctaaccaccgcgactcaaggctgaccatnttctagcaggagaacttcctgngcaggaaaggctgagctgaacgatgactatccctctctgcaggccatgggctgggacggcactgaagngggctccttccatgatcaatctggggcgnggggtttgttcccaatttcctggctacccga

SEQ ID NO: 361 - DNA, 219 bp, Homo sapiens
tgagatgtactgctccatctgaaagtcaaggttggtgccacctaagtgggttcccgcagcaaggaatttgaggacatcctcctccttcatctgcaggacgtcaagggctccggacattgtgtaagtttccctttaagttacgatgggaatcaagaacaacgccgtatggacccgtccccgggtagcacggaaagcctataataacttttaaaagcaaaa

SEQ ID NO: 362 - DNA, 178 bp, Homo sapiens
attactgatcaaggagaactgaccgctgaccccgacagtgaagtggctactacaagtctccgggtgtcactcatgtgcccgctagggaagatgcgcctgactgtcccgtgtcgtgccctcacctgtgcccatctgcagagtttcgatgctgccctttatctacagatgaatgagaaga

SEQ ID NO: 363 - DNA, 166 bp, Homo sapiens
  misc_feature (1)...(166): n = A,T,C or G
gactgaggtatttactcaagcaggatgcancctgtgcctacatagcaccttcatacatgaacaatcatagcagnttcattcataacagctccaaatggggagcagctcaagtgcccatcaaggaatgaaagaaagagagaaatgaangatagaaggaagaaaaagg

SEQ ID NO: 364 - DNA, 502 bp, Homo sapiens
  misc_feature (1)...(502): n = A,T,C or G
gactgaggtgacacccattctacggaatataagtaccagctaaagaggacacacacttgaagaaaaaggagacaatgagganancacgtccntcctgtgtgtnccccanntanncncaatncagtgaanctgactntctaangaaaccntctagttgggnctggagagatggctcagnggttaatgagcactgactgctcttcaagatgncctgagttcaatnccnagcatncacntggnggctnacnacgatccataatgagatncagtgcccccttctggtgnatntgaagacngntacnntgtactcacatacataagaataatattaaattttgactctctnnacaaatngntgatcangaaagacannagcgcgaggangcgttgnanagttagctgtacnagctagcctntctcacggtctggtgagtcctatttatactccctccaaacatcacattgtnctncatggnttcttgcctcaccgtgtgtcttacct

SEQ ID NO: 365 - DNA, 126 bp, Homo sapiens
  misc_feature (1)...(126): n = A,T,C or G
gaactgagcctaaaggactaaaagggaaaaatggtaggacgagaaaaaaaagtcatccatccgtacagtagaaaagcanctcagattacaagagagtctcacaaacaagacaagaaggaaagattg

SEQ ID NO: 366 - DNA, 228 bp, Homo sapiens
actgaggtgggtctctttgtggacttttccgtgcgactcttcacccaactgaagttcggagtggttcaaacgtgtatcctttctacggctccattgtttcagaccctttcattctcgaggctctttcttgttgagaaatttatcagtaaatgtggtatttgagagactgtttgttagccattcaggcaggagtttttaaattgtcactgaaggacaggaaaaaaaaaa

SEQ ID NO: 367 - DNA, 449 bp, Homo sapiens
  misc_feature (1)...(449): n = A,T,C or G
aggccttgaagagatccgcaaatgtggantgaaaaacttccgnaacatccaggntgatgaggctaatttattgacttggcaagggcttattgttcctgacaaccctccatatgataagggagccttcagaattgaaatcaactttccagcagagtatccattcaaaccacccaagatcacatttaaaacaaagatctaccaccctaacatcgatgagaaggggcaggtctgtctgccagtcattagtgctgaaaactggaagccagccaccaagactgaccaagtaatccagtccctcatagcactggtgaatgacccccagcctgagcacccactccgggctgacctagctgaagaatactctaaggaccgtaaaaaattctgtaagaatgctgaagagtttacaaagaaatatggggaaaaagccgacctgggggcttaaaatctgc

SEQ ID NO: 368 - DNA, 397 bp, Homo sapiens
  misc_feature (1)...(397): n = A,T,C or G
atttgccagctgaaggcatttacattcggagttccgcggactcttcanaggctgtaaaaatgccggagtcacnaaagcctgcaaaaagctgttgcttgccttgctgctgctgctgctactgccgtccctgcccgtgctgcaagctgctactcctgctgctgctgctgctgcttgttgctgattgttgcggttgctggttgctgtttactgtttgctgccggctggattgctggattgctgattgccagtcgggnaaatcctggnnataaaaatccancttgccccanaaaacangacnaccctnnaggaagtattctaatgatttcaatncgccctttccccctctnacctttctctcttaccttatgctgggggattggaagggtggcaaaaaaaa

SEQ ID NO: 369 - DNA, 285 bp, Homo sapiens
  misc_feature (1)...(285): n = A,T,C or G
gatggagaaactgaggttccgcatngaancaggctgattcagacctcgctgccactgagtatgagaccacctggggtgaaacttagatggctctattgttctgtcacctgccgccactcctctccaagacactgttacctgcccttgagatattccggagacagcatcccgcagatcacctacaggctggcgacaggcaccaagaatggattggtgggggatgggcctcccctctttatacgcacagagtcttagtaaattttgggtccttgaacagaaaaaaaa

SEQ ID NO: 370 - DNA, 287 bp, Homo sapiens
  misc_feature (1)...(287): n = A,T,C or G
caggagtaacaagtgtggaggtcnaagganaactcttggaatctcttctatcctatcacatcngtctcaggcatcnaacatgggccaactcctcaaacttggtancctggnacttnaatanccatcttantgctcaaaaaaggtttctcctatgaagaccgtgtntcctggctgtcctagaatttgctgtgcnnaccaacctggcctnnaactcataaacntttacctgcctctgcctctaaagtgttgggattnaaagcatttcccactatgtaacaaacaaaaaa

SEQ ID NO: 371 - DNA, 417 bp, Homo sapiens
  misc_feature (1)...(417): n = A,T,C or G
cgcccatcctaaattcctagcttgctcggggtaggagnttcctgttcattcgttctgatanncccactgntgaaaactgaggngccacactcgtatcnctntcnacnggacctaacattattcggganggaactctggtccncncccccatcnttcaatnnnnntgtcgtggngattggnttngaaccntgntcagnataaagctgaaaaaaaccccattgnctnncatttncaccangaccgggaagngtntnatatcnaggatccgaataaggctcttcaaggcttctttgaccgagaaggagaanagttagaatatgaatttgatgagcnaggacacatcacttggctctgcagggtgaggttacctgtagatgattcnnctgggaaacagctggtggctgaggccattcactc

SEQ ID NO: 372 - DNA, 173 bp, Homo sapiens
gtctagaatgtatgtgccatgctgggaacaggcctggatcgtctgcaagagcagccatcggtcttagctgctaactcctctctcagtccattttgaatacgattctgaggtgacgcttccctgtcaccacccttaacatgctctcatcgtaccctctggtcaaataaaaaaaa

SEQ ID NO: 373 - DNA, 167 bp, Homo sapiens
  misc_feature (1)...(167): n = A,T,C or G
tctagatgtatgtgccatgctgggaaccangcctggatcgtctgcaagagcagncatcggtcttagntgctaactcctctctcagtccatttgaatacnattctgaggtgacgcttccctgtcgncacccttaacatgctctcatcgtaccctctgaaaaaaaaaaa

SEQ ID NO: 374 - DNA, 191 bp, Homo sapiens
  misc_feature (1)...(191): n = A,T,C or G
attctccatccacaaattatgcagtcaagtttcctcnaatttggggtcaatacacacagagtgcaatggatgaacctcgctctggagaaatcacctgcataatcatggtatttccccttccaggatttatacanaagcagtcttccaaattctgaaacctgatgcccatcacatactttgggctgagaaaa

SEQ ID NO: 375 - DNA, 157 bp, Homo sapiens
  misc_feature (1)...(157): n = A,T,C or G
ggtctagattatgtgcatgctgggaacaagcctggatcgtctgcaagagcagncatcggtcttagctgctaactcctctctcagtccatntgaaatacgattctgaggtgacgcttccctgtcnncacccttaacatgctctcatcgtaccctctga

SEQ ID NO: 376 - DNA, 273 bp, Homo sapiens
  misc_feature (1)...(273): n = A,T,C or G
ggaatacaaagggccagggtccggctgcgtctcctggatcttgagctgacatctaggttcctgggtgggaccacaaatncaactatactggaggctgatgcanttctcttaggactccaagagatcagggactcaaaatcaagagaggagcaacccagcaagtaatggactgcgcttgctgtatttgaacccattttgagcccagaaaactataaataaataaataattgaataaatttatnataaatgaaaagtaatcctgttaaaaaaaaa

SEQ ID NO: 377 - DNA, 370 bp, Homo sapiens
  misc_feature (1)...(370): n = A,T,C or G
actgaggtgacctttgaaagttaacaggggtgccatgggctgagtaagataaacggaactgctgttcaaccccgcccagtctggggatgagtcattgttttcaaatttatgaacaaagcacacaaattaagaataatacaagcaagaaacagcagagagacacaaaaggacatagaatccctgatcctcactgtgatctggtaacactagttctagggctggagagagagatgctcagggcaagtgctcttacagagaacatgagttcaattcccagaacccacatggtacctcacaactgcctatttcatacatgtggggcagaacaccgatacacatacttttttttttaanaattgaaaaaaaaaaa

SEQ ID NO: 378 - DNA, 448 bp, Homo sapiens
  misc_feature (1)...(448): n = A,T,C or G
ctcctttagtgagacngccctaggcagaccacntaccnttacccttctgaaatctcggtactggaggatctnggccnggatcctgatacccccattgcccccttagcnacccatcctgacnaggaggaggaggaggaggaggaagaggaggagttgcttctgcngcctgggctccagggcgggctgcgcaccaaggccctantcgtggatgantcctgccggcggtgaccatcttccantttgggcgcatacctccttccttccttccttcccgtacctgaagcttctggagtctggatgattcanagccgacanacctggcngggatcctgcctggcagggaagggggttgancntnttctgacttgcttttcccatcccatttctggggcnnanccnttatcctaaatttacccctaactcatggtgtttcccgtgggtgacctaa

SEQ ID NO: 379 - DNA, 394 bp, Homo sapiens
  misc_feature (1)...(394): n = A,T,C or G
tcctgatactgcttgntnggggtagagctncctgctcntacnttctgccnnaccnnatgctggaacctgagnatcnacataattgcaccttctcttctggaccagacattattcggcgggaatcgggtccccaccccctgacgtcatacctggtgtctcanccnnngnatttgaactgtgatcatctgagccaaaatannccaaagtatanaagtcaacaaaggcaanatgctgnanatnaaatggaaaaccantcattganaacatcatcncctctntnctccgaggacncttcggtgcggatctgggatatcccnnanggtgggctgaaacggaacntnaccgagggactcctggagctcnatgganacatgcgccatgtggggctggtgga

SEQ ID NO: 380 - DNA, 461 bp, Homo sapiens
  misc_feature (1)...(461): n = A,T,C or G
cgcaccggattgggcagcantaacnacactgcaanaggancctnctgcacacgtttattggganagtntgattgnagaggtgannagaccccgagcccaaaactggtgctgcttatataggcctangagaggantgtctcacacctggattggttatgcactacgcctcatttgcatgatcctcatctgattggctactctctctctgtacctcacaaagcctcattntcatacctcatttgcatgtctcacacctgattggttatantctccaaaccccctttatcctgcccggggcnngcantgtctttgcaaaaaactttactgcatatgttcacattggttgtttgtccaaacttatgcgtggtggccancagtantcagtgccactctgcaacggcacntgtggcttcccacatctccccctttttgttttaataaaatgaggctgggactaggcc

SEQ ID NO: 381 - DNA, 301 bp, Homo sapiens
aagtgttccctaagaaggttgtcaccctgacggaagaacggaaagcccaacagctccagcgcctcctggacatgaagagcaaccccatacagggcctggctgcccactgggattatgaaaagaaggagtggaaaaagtgaccaacgtcccacgtctgccgccagcccctgcaaactgcttctgcagcccaggagacaatcatcccctcccctcccctcccctccctcctcctcctgagtcctgtctccactcccttctccaataaaagcagcctgctttgttctgcttgcaaaaaaaaaaa

SEQ ID NO: 382 - DNA, 285 bp, Homo sapiens
  misc_feature (1)...(285): n = A,T,C or G
aggttcctaaaatcanactctgtcatcggnaagtgnagactgtaacaaactgggaccctcacatgccnataagcantcaaaaatatttnctgggagctggananatgggctcagcagttaaaaacactgactgctcttccggangtcctgtgttcaaatcccagcaaccacagggtaactcacaaccatctgtaatganatctgatgccctcttcgggtgtgtctnaaaacagctacagtgtccttacatataataaataaataaatctttttttttaaagaata

SEQ ID NO: 383 - DNA, 100 bp, Homo sapiens
  misc_feature (1)...(100): n = A,T,C or G
ttgccccaaattggctgtagccacacanacatgagaatgtcagatctcattccggatgaagccctgagaagggcaatcgagagccacaacaagaaaaaaa

SEQ ID NO: 384 - DNA, 269 bp, Homo sapiens
  misc_feature (1)...(269): n = A,T,C or G
catggaatggacgggacaaggaaggcaaacattcacctggaancaaaanctgtgctgctttntggcttatttacagtanntttncncaaccggcaagcttgtgcantnnnagcaagaactcctcctgcctgcctccggaataagctgttgaattcttgtttcttccagcgcggtgtctgcctgcacgctgccatgcgtcctgccatgatnataatggactgaccctctgaaactgtaagccagccccaantaaattttgtccttgataa

SEQ ID NO: 385 - DNA, 312 bp, Homo sapiens
aaggttgtcctcggaggccaaaggcgtcagatacgacacctggaagttgaatttacagaattgccagctgcccaacatggattcttggaaccaaacctttagaattcaacaaacaaacaacccagggggctggagagatggctcagcactcaagagcactgactgctgctcttccagaggtcctgagttcaattcccagcaaccacatggtggttcacaaccatctgtaatgagttccaatgccctcttctggtgtgtctgaagacagcgacataaaatgaataaatctttttaaaaacccaaaaaaaaaaa

SEQ ID NO: 386 - DNA, 177 bp, Homo sapiens
  misc_feature (1)...(177): n = A,T,C or G
aagaaacgttttgtaagtgaagganatggaggccgtcttaaacctgaaagctactgagcacagcaactcttacagtcttaggtgttaccaanaacanatctcaactgtaaaagttgtcagtacaggtttcctttncctttngtttttgttattgttttttttttttttttttttttt

SEQ ID NO: 387 - DNA, 273 bp, Homo sapiens
  misc_feature (1)...(273): n = A,T,C or G
tcatggagaataacgggaacaaccnaaanctccgggtttgcgttgccacctgcaaccganctgactantccntacnggccccggatcatgtncggcatcaaaacnaagcccgcgtnctttgagttggangtggtggtgctcggctcccacctgattgangactatggctcctgctccctganctgcttgagttccagtcctgacttcctttggtgatgaacagcagcatggaantgtaagccaaataaacccttncctccccaaaaaaaaaaa

SEQ ID NO: 388 - DNA, 204 bp, Homo sapiens
  misc_feature (1)...(204): n = A,T,C or G
gggttccaagactgccctttgggattcaaacgggagccgctttggactgactggctgccttcctcctcctccccctcctcccccttctgcttcagatttatttattatatgtaagtacactgtagcagttgtaggacacactagacgagggcaccagatctcattgtgggtggttgngnaccncccaccatgggggggctggga

SEQ ID NO: 389 - DNA, 427 bp, Homo sapiens
  misc_feature (1)...(427): n = A,T,C or G
gcttggccaagattcaccagggcctgctgtcctcacctgtggatccaccagccagccatggtatagaggtattcccagcaagtcaaagatgctgcattccggcgtatactcaaagtcggagacgcccgtgaatcgcacattgacgtccagacctgtggccagtttcgggagcaccgtcattgcatcgtccacattctggtgggagaaaagacaagatggctggtctagccttccctccctgccacccaccatcccatgtttcatgtctggctttcttacaaaccgtttgtttcatccacctcttacctcaaacccccttttgtgagacagagccctggctgtattgaaactcactctgtanaccaagcttgcccttgaactcacagacatctacctctctctgcttcccaagtgctgtaattaaagg

SEQ ID NO: 390 - DNA, 265 bp, Homo sapiens
  misc_feature (1)...(265): n = A,T,C or G
gggttccaagactgccctttgggattcaaacgggagccgctttggactgactggctgccttcctcctcctccccctcctnccccttctgcttcagatttatttattatatgtaagtacactgtancagttgtaggacacactagacgagggcaccagatctcattgtgggtggnngatgannncatcancatacaggctacacaggaccancaacggaatgaggagtaggcccggatcatggntgagtntgagatcacagagcag

SEQ ID NO: 391 - DNA, 335 bp, Homo sapiens
gatggtgcctgaacccaactgattaagcaggcaggcagaaacgtgtcaccatcagctaccattgtgccctcatgcataaatgaagtcctgatggaaaacagacaaacaaacaaacaaacaaacatctctacacactaagccgaaaacaaatctataccaaactgctaaaataaatggaaaatacttaatttgagcctggctgttttgaaaattggaaatccttcttcaaaatgaaaatcaccgcaaaacaatctaaagtcatctacaggccaactagggtgtttgttgcttgccaaacttccaataaattctgcttgaaaccttaaaaaaaaaaa

SEQ ID NO: 392 - DNA, 587 bp, Homo sapiens
  misc_feature (1)...(587): n = A,T,C or G
gccggcctccactcctccatgtccngngcctgcntctccnnccacttgtntcccntcaccnccatnaccatgtanancggggtgancaatgtgggcnttcaccaccaccatcaccattctccccatcgtctccaccaccacaagcaccaccaccgccaccaccatgctcatggagcccgccgctaaggccaatagatagcatctacctggctctgccctccatccagcancaacatgagtggatcctgatgctgccacggaaaaggatgtgcctctgggataaaagggggtactgggaccctggtcctgcttgggtttcatttgcatatgagcccttctccctatgtgcaacaganaccacctgggtgccctctacacaatgtgngggcttgancttcgagcaaggctggctgantttcctaccttgtgactgcaactcctggtgacctggaaaataacaagggttctggcanaaacaaaacccnggtgaaaatgaaaattcttctgattggggaaggcctgtgatnaacttccaggggcnaantgtggttagggcattcactgcttcttgggttttaaaaataaaa

SEQ ID NO: 393 - DNA, 180 bp, Homo sapiens
agggttccaagactgccctttgggattcaaacgggagccgctttggactgactggctgccttcctcctcctccccctcctcccccttctgcttcagatttatttattatatgtaagtacactgtagcagttgtaggacacactagacgagggcaccagatctcattgtgggtggttgcga

SEQ ID NO: 394 - DNA, 232 bp, Homo sapiens
  misc_feature (1)...(232): n = A,T,C or G
gggttccaagactgccctttgggattcaaacgggagccgctttggactgactggctgccttcctcctcctccccctcctcccccttctgcttcagatttatttattatatgtaagtacactgtagcagttgtaggacacactagacgagggcaccagatctcattgtgggtggttgngaaccacccaccatgtggtngctgggatntgaactcaggatcttcagaagagcag

SEQ ID NO: 395 - DNA, 213 bp, Homo sapiens
ggaattttactacttcacaaatggagaatgatgctacaaagttaccatggtgaagctgacaaataccactcaaatgatgatgacatagaagtaccttcctcctgctgctctgatcccataattggttactagatgatgttttctgacatggatttcgattttgggtacctgttactttggcactattcttttttttttttttttttttttttt

SEQ ID NO: 396 - DNA, 735 bp, Homo sapiens
  misc_feature (1)...(735): n = A,T,C or G
gaaacttatctccctccccatatcctgaaactgctgnctcggngtgtgacctcctgctcgtncgttctgncncncccactgctggaacnnnanganccgcncacatgcagctnnctactggaccataaattattctgngggaatctggtccccnccccctnccttcttnnctggtgtcgcnccgntgtgatntgacccttgatcggacaatctcctccagggntggccanggatcnatcccttanagtaactcaagagttccncatgctgtgttatctggactcccactaantgcagcactgtgccttcggaacnacaccatcnagaatgtatcccttcntcnctccagctngacnactaccaagatctccaccaccctttcttccttctgggacatcgtgtnccaacccantggtccatatccaggccctgctgtactantcccnggccccacnaggtcatntntntcaacaaaatgtgcccgntccaaaanctaccnncgccnaatancgcacncacagatccanttggtcctttaagtacacngggatccatgtcttctggaccttgggcaccangaatgggaaggcagcatcctaatgtgccatatctatttccanaatcatctcccactcctcctcttccantgttaggancacacctgtttgcattggttcnnntgccnccgggggccgggaaccncancgcatatcctnatcctgaagcgtcttccca

SEQ ID NO: 397 - DNA, 677 bp, Homo sapiens
  misc_feature (1)...(677): n = A,T,C or G
aatgcagacataaagcctttacttggagaacagatcatactccaagggaacatcatcagcatcaccaccagcagcaccatcagcagcaacancagcagcagcagcaacagccacccccaccaatacctgcaaatggccancaggccagcagccagaatnaangcttgactattgacctgaagaattttaggaaaccaggagagaagacctttacacagcgttnccgtctctttgtgggcaatcttccccctgatntcactgaggaggaaatgagganactatttgagaaatatggaaaagcaggcgaanttttcattcataaggataaaggctttggctttattcgcttggaaacacgaaccctagcggaaattgccaaagtgganctggacaacatgcccctccgtgggaagcaactgcgaatgcgctttgcctgtcacagtgcatcccttanagtccgcaaccttcctcagtacgtgtccaacgaactgctggaanaaccttttctgtgttcggccangtggaaaaggctgtaatcattgtggatgaccgaagaaggnccccgggaaaagcattgtttattctcaaggaaaccagctgctccgaaanctctggananatcagtgaaggntccttcntgctgantacatttcctcngcctgtgaatgtggacctat

SEQ ID NO: 398 - DNA, 305 bp, Homo sapiens
  misc_feature (1)...(305): n = A,T,C or G
atagacacatagagaaggagacaagaagaagaagagtctaagagtgtcncgagttccagtacctctagcagtgacagttcggccagtgagtcttcatcagagagtgagacatccgcctcatcctcttcagaagacagtgactcagatgaaagcctctctagctcctcctcctcctcctcttcctcggcctgttcgtcttcctcttcctcctcttcctcctcctcctcctcggactcggactccagctcgtccagcagcagcagcagcagcagttctgagagcagctctgatgatgagccacagaa

SEQ ID NO: 399 - DNA, 226 bp, Homo sapiens
  misc_feature (1)...(226): n = A,T,C or G
tgtcctggcactctccgactccagcagcagtagcagctccagcgactcanaagcagaggggaaggagtatgccgctggctgcaagaacatgaacgctcctcagacaaggccaagaaacccaaggtgaagaaggagaagatggagaagaaggagaagaaggagaagaaggagaaggagaagaagccccccattgacttattaaacttgcagccctttccgctcccca

SEQ ID NO: 400 - DNA, 459 bp, Homo sapiens
  misc_feature (1)...(459): n = A,T,C or G
aggtccaacagaagatatggcccagattaaaggtatcctcaagatctggattaaaggcttgtgtcaatccagatccaaagcctgtgacatcacacctcaagattcagatcaaagcctatgtcttccaggctcaagatccanancacaagtgtgcccaccatttctggattgcagttcattccagatatagtcaagttgacaactgagaagaaccatcacaggttataaacacctatcatttgctctcattttccccatatgttctctgctcatgtgagatcctgacttgaagtgtttcccccaagcttgttttccctgatctctaaaaatacagccagaaagaagctctttgttctctatagccagcaaaaagcctttttgtttctataccttacaaccagagatgcaataattgtaaaaagacctagccaggcacttgcctggctccctgtgccaagg

SEQ ID NO: 401 - DNA, 234 bp, Homo sapiens
  misc_feature (1)...(234): n = A,T,C or G
ctgattacagattctgctatgttctgtgccctangaaaccgtgncantagaagtgagtagatctgttttgtatagttacccacaataagcttggacctgaaccaaccacccagcagcactgcctgcctctgtgtataagctnttatggngnnngcctttatanagatgtccctgggatggccccaacataagagagacatctgcactaanaacaacaacaacaacaacaacaac

SEQ ID NO: 402 - DNA, 237 bp, Homo sapiens
  misc_feature (1)...(237): n = A,T,C or G
tgctgggcaccatgtgtggtctagggcacagaanagncagaagaagacatcanggtcccctggagcggatgttatcagctgccctgcaagtgctgggaactcaacctaagccttctccaaaaaccaggagtactgtgaagcacctggccgtctctccagtcaccaacaacaacgctgcttgttagcaaatattttgatagcagcaacaagaaattgcctaatataaggtctcaccca

SEQ ID NO: 403 - DNA, 170 bp, Homo sapiens
caagactgccctttggtattcaaacgggagccgctttggactgactggctgccttcctcctcctccccctcctcccccttctgcttcagatttatttattatatgtaagtacactgtagcagttgtaggacacactagacgagggcaccagatctcattgtgggtggttg

SEQ ID NO: 404 - DNA, 158 bp, Homo sapiens
ggtctagatgtatgtgccatgctgggaaccaggcctggatcgtctgcaagagcagccatcggtcttagctgctaactcctctctcagtccatttgaatacgattctgaggtgacgcttccctgtcaccacccttaacatgctctcatcgtaccctctg

SEQ ID NO: 405 - DNA, 261 bp, Homo sapiens
  misc_feature (1)...(261): n = A,T,C or G
agtctcgaaaggtaagtctggncaccatgtgtgtagnnggcacggaaccntnagaataanacatnatgnngcctggagcggatgttatcagctgccctgcaagtgctgggaactcaacctaagccttctccaaaaaccaggagtactgtgaagcacctggccgtctctccagtcaccaacaacaacgctgcttgttagcaaatattttgatagcagcaacaagaaattgcctaatataaggtctcacccataaaaaaaaaa

SEQ ID NO: 406 - DNA, 259 bp, Homo sapiens
aagttggaaattgcaatactcctaaaccaaatttctttgattttgaaggaaagcaaaaatgggaggcatggaaagccctcggtgactcaagccctagccaagcaatgcaggaatatatcgcggcagttaaaaaactagatccaggatggaatcctcaggttcctgccctccttgagttcctgtcctgacttcctttgatgctgaactgtgatgaggaagcataagccgaataaaccctttgctctccgaaaaaaaaaaa

SEQ ID NO: 407 - DNA, 177 bp, Homo sapiens
  misc_feature (1)...(177): n = A,T,C or G
gggttccaagactgccctttgggattcaaacgggagccgctttggactgactggctgccttcctcctcctccccctcctcccccttctgcttcagatttattnattatatgtaagtacactgtagcagttgtaggacacactagacgagggcaccagatctcattgtgggtggttgt

SEQ ID NO: 408 - DNA, 256 bp, Homo sapiens
agggtctcttctctctactcagcaccagctgatctggaagccactctatagagcagactgactttgaaatcacagagccacatcagtctctgcctccccagtgctgaaattaaaggcgcacaccacccgctctggtgacatttttctttaaaaaatgaacaaaaaagggttgcgtttgccagtttttaaaaaagaattgccttttcgatatttgttttgaataataaaatcttacattttgagtgaaaaaaaaaaa

SEQ ID NO: 409 - DNA, 138 bp, Homo sapiens
  misc_feature (1)...(138): n = A,T,C or G
ggaggaattttctcagcaaacatcatttaaaaggaaattaatggcgaaaatggggcattgggaaaccatgggggaggggggagactgananaatganaatgaataatggcaaaataaataaataaataaataactaaa

SEQ ID NO: 410 - DNA, 305 bp, Homo sapiens
gggagaaactcactcgccaaacaacgtctcgtggtatcctggctgactctggccgcttcagcagagcctggctgttcctgctggattgtgctactgctacagattcatgtttggtgtttgctattgaactgggctgcttatatcctgacacggaagagtggaatcgcccaaagcaagtacttctaatcaggtccacaactccctttgcctttaaccttgctttttccctacctctggttggtgggctaaaagggagggttaagaaccccaaataaagtcagttttgaaaaacctaaaaaaaaaaa

SEQ ID NO: 411 - DNA, 238 bp, Homo sapiens
gggaacattgtggcaggaagacggaagtagtgctggagaggagactggagagaaacactgggcctgtccctgtgatgcacttctgccagcaaggccacgcctcccagtccctgaagtgtcactccctgaagatgaagcattcaaatatgagtcgatgagagccattcttgttcacgtcgccatagttatggaggttggacccagcactcaagactgttataaagaatttttgctttgg

SEQ ID NO: 412 - DNA, 363 bp, Homo sapiens
  misc_feature (1)...(363): n = A,T,C or G
gggttccaagactgccctttgggattcaaacgggagccgctttggactgactggctgccttcctcctcctccccctcctcccccttctgcttcagatttatttattatatgtaagtacactgtagcagttgtaggacacactagacgagggcaccagatctcattgtgggtggttgngaaccacccaccatgtggttgctgggattngaactcangatctnnataagagnagccagggctntaaaccgntgagccatctctccagcctnctgcattccttcttaangcatgaatgancccnacctangaagacatgctgccntacctccttttcnagccattttccctttcaccatatactca

SEQ ID NO: 413 - DNA, 272 bp, Homo sapiens
  misc_feature (1)...(272): n = A,T,C or G
gggttccaagactgccctttgggattcaaacgggagccgctttggactgactggctgccttcctcctcctccccctnctcccccttctgcttcagatttatttattatatgtaagtacactgnagcagttgnaggacacactagacgagggcaccagatctcattgtgggtggntgancncnanngaancagnggnnggtgggngacaanngnanggnngttagaacagaagacnggtgnatanaccnagntactattacgtccatgagact

SEQ ID NO: 414 - DNA, 401 bp, Homo sapiens
  misc_feature (1)...(401): n = A,T,C or G
gggtccagaaaaggagatggatgccatacaggccaaggaagaagtgaaaaaggcccgtgaagaagatgaggaggatctgctgatggggaagtttcacaggcacaaccatttcagcagattccacaggcagggcgaactatagtcatcctcactctgcatgctgagtggcccagctgcaactctaataatacacatttgaatgatcacatangnangganantngnccagnttctgaaaaacaatcccctgtttgtgttagggtcccccgtttcttctatagacccctatgaccccagggtctgcaataagaagtttctgttgactgcatgtggtggcacactcctttaatctcaggacttgagaggcagaggcagacntatctgggatttccacatcagcc

SEQ ID NO: 415 - DNA, 372 bp, Homo sapiens
  misc_feature (1)...(372): n = A,T,C or G
gagagagagagagagagagagagagagagagagagagatgagatanaggntggaggcctcgnggagcagcctgtgtgcacctgactggnccagnaggaacacagtgtncagagaagctcctgtccccctgtcccctctgggtgccaaataatgggagatgtgcactgtctgatcacatattcccgtctnctgccctntgcccagttaaggttaaggntgatgaataancccttggattattctgagganctgaccannccacagaagaaagcannccctgtancttccctggtcatttcccaagaatcttcctgccctgttgagacttgccccaagtctagggcagtcttcaagcaagcacctcttgcttgg

SEQ ID NO: 416 - DNA, 161 bp, Homo sapiens
  misc_feature (1)...(161): n = A,T,C or G
tgaggcctatatgtatgagccatgctgggaaccaggcctggatcgtctgcaagagcagccatcggtcttagctgctaactcctntctcagtccatttgaatacgattctgaggtgacgcttccctgtcaccacccttaacatgctctcatcgtaccctctg

SEQ ID NO: 417 - DNA, 335 bp, Homo sapiens
ggtgatttctctgtgccaaagcctccagaggacaatataaaagacgtgtgtacaacgtcacccaggaaaacaaagaagaagaatatagcttgccagtggggagttagtcttgccttttcttttttcctttgaatcagagtctcactggatagctctggctactctgggactctctatgtagaccaggctggcctgagtgctgggactaaagggtgtgtgccactacccccagctaaattggtgtgttctggagagattcttttttatgtttggcccattttaattctttcaggcatcttactactgctgttttaaagtttttttcttttaaacca

SEQ ID NO: 418 - DNA, 473 bp, Homo sapiens
  misc_feature (1)...(473): n = A,T,C or G
ctttcagggacccgctgggaagacgaagagagaccagatcatactccagatcattaaggattttaaacccccatgttcctcgtgcggcgctcaccaccaccccccggctctggccatggccacactgagggtccatcccgaagcccaagccaaggtggatgtgttccgtgaagacctgtgtagcaagacagagaacctgcttgggagctattttcccaagaaaatctcagagttggatgcgttcttaaaggagccagctctcaatgaagccaacctgagcaatctgaaggctccattggacatcccagtacccgatccagtcaaagagaaagagaaggaggagcggaagaagcaacaggagaaggaagagaaggaagagaagaagaaaggggacgaagacnacaaaggtccccctgtggnccanttgaactgcatgagaaaaatgngggcctnctgcaacggctaaaacctgg

SEQ ID NO: 419 - DNA, 323 bp, Homo sapiens
  misc_feature (1)...(323): n = A,T,C or G
agggggcaaggccatgtgggacaccccanacactgtcctcttanagcgccgggcgggccattaggcaggcgctgctcacaagccgaggcgtgtctctggcagctcctccgactccagcagcagtagcagctccagcgactcagaggcagaggggaaggagtatgccgctggctgcaagaagcatgaacgctcctcagacaaggccaagaaacccaaggtgaagaaggagaagatggagaagaaggagaagaaggagaagaaggagaaggagaagaaggccccccattgacttattaaacttgcagccctttccgctccccaaa

SEQ ID NO: 420 - DNA, 352 bp, Homo sapiens
ggaccctgtgtgctgtgcaatcaagacccaaactagaagaagggtctgttttactgctcttggaaggccacgtctaaaattaaaccacgttcaggggaaactgtgcacccaaatatttctcagtcgcaccccagcctcacaaacctattctagggctggaaaagctggctcagccgttataagccctggctgcactaccagaggacccagcctcaatttccagcacccacatggcagctcataactgtgtagatccagttctagaggatccaacaccctcacacatacatgcaagcaaaacaccaatgcacagaaaatgaaaagaaataaatcgttaagaacaaaaacaaaa

SEQ ID NO: 421 - DNA, 305 bp, Homo sapiens; identical to SEQ ID NO: 410

SEQ ID NO: 422 - DNA, 158 bp, Homo sapiens; identical to SEQ ID NO: 404

SEQ ID NO: 423 - DNA, 274 bp, Homo sapiens
  misc_feature (1)...(274): n = A,T,C or G
tactgagcctcacggtttcttntggctggaactgcagttcatgcntggngattgccgagtggattgnagtgcatctgctgatgatttgagtctgtgctgtgctaacggacttcactacaacncccgattggaatcacccccaaagaactgnttgtataacgaggtccacaactctgtttcctatctttccccatgacctttgctgggtggtgggctaaaagggaggttgaagcgtttaagaacccttattaaagtaggtttggaaaaaaaaaaa

SEQ ID NO: 424 - DNA, 221 bp, Homo sapiens
  misc_feature (1)...(221): n = A,T,C or G
gtgcaaaaagaagaagaagaagaagaagaanaagangaagangaagaagganaaggacanngacaaggagaacggagaangagcaaggaaaaggagaacggtacagnatnngnggagagaatattnctaaaatatttntgnaatatttgatatgtaatcattacattnagtcaaaaaattcanatttctagaaaatataaagtttttttttgtcgattcct

SEQ ID NO: 425 - DNA, 253 bp, Homo sapiens
  misc_feature (1)...(253): n = A,T,C or G
actccaggagaagaaggaagtngtggaggaggcagagaatggaagagatgcacctgccaatgggaacgctcaaaatgaggaaaatggggagcaggaggctgacaatgaggtagatgaagaagaggaagaaggtggggaggaagaggaggaggaggaagaaggtgacggtgaggaggaggatggagatgaanatgangangctgangctcctacgggcaatcgggtngctnaggatgatgatgatgaccatgtg

SEQ ID NO: 426 - DNA, 226 bp, Homo sapiens
  misc_feature (1)...(226): n = A,T,C or G
agggttccaagactgccctttgggattcaaacgggagccgctttggactgactggctgccttcctcctcctccccctcctcccccttctgcttcagatttatttattatatgtaagtacactgtagcagttgtaggacacactagacgagggcaccagatctcattgtgggtggttgcaaacgnnngacacactngacgagggcaccagatctcattgtgggtgga

SEQ ID NO: 427 - DNA, 323 bp, Homo sapiens
gcatcccttcgtcagcagagtcaccagcaataaggctcttcgggagctggtggccgaggcaaaggcggaggtaatggaggagattgaggatggcagggaggacggagaagaggaggatgctgtggatgctgttccgggctggagagatggctcaacggttaagagcactgactgctcttctcaaaggtcccgagttcaaatcccagcaaccacatggtggctcacaaccatctgcaatgagatctgacgccctcttctggtgtgtctgaagacagctacagtgtacttatatataataataaataaatctttaaaaaaaaaaa

SEQ ID NO: 428 - DNA, 201 bp, Homo sapiens
  misc_feature (1)...(201): n = A,T,C or G
cacattcacgaccacacctaaacctacagaatcagaaacgccactagtggggtcggtcctgaaacctggttaacaagctcccaaggtgaatctgatggccgctttccctaagcagtagagaccctttttcgtgtatggtgctgaaaatttaancgtcctctgtccccaaatcagtgaaaaatcnggatttaaaaaaaaaaa

SEQ ID NO: 429 - DNA, 372 bp, Homo sapiens
gagactgacccgctcctcaagatttattatatgtacgtacactgtcgctgtcttcagacaccccagaagagggcatcagatctcattaaggatggttgtgagccaccatgtggttgctgggatttgaactcaggacctctggaacagcagtcagtgctcttaaccgctgagccatttctccaacccttaagagtgtattttatttccttttgatttcctgcaagtatcatggtttcagttttctttctggctgtaagactccattgtatgtccgaaccacattttatctgttttacgggccagttggctgcttctgttcttttgcctattgcaatcgctacagcaataaacatggatgtgtaaaaaaaaaaa

SEQ ID NO: 430 - DNA, 284 bp, Homo sapiens
  misc_feature (1)...(284): n = A,T,C or G
ggttccctaaaatcagactctgtcatcggcaagtggagactgtaacangactgggaccctcacatgccgataagcagtcaagaatattttctgggagctggagagatgggctcagcagttaagaacactgactgctcttccggaggtcctgtgttcaaatcccagcaaccacagggtaactcacaaccatctgtaatgagatctgatgccctcttcgggtgtgtctgaagacagctacagtgtccttacatataataaataaataaatctttttttttaaagaa

SEQ ID NO: 431 - DNA, 324 bp, Homo sapiens
  misc_feature (1)...(324): n = A,T,C or G
gtttgaatttgagtgccgtgctcgaggtgccgacatcttancctacccacctgtggttgcnggcggnaatcgctccaacactttgcactatgtgaagaataatcaactcatcaaggtaatcaccagaattcccacccctgcgttctgctcctggagaggcctggtccccagtagagagctccacacctctcccttagcaaatggagtgccacacgccttcaatcccagcactcgggatttctaagttcgaggccagcctggtctacagagtgagttccaggacagccagggctatacagagaaaccctgtctcaaaaaaaaaaa

SEQ ID NO: 432 - DNA, 431 bp, Homo sapiens
  misc_feature (1)...(431): n = A,T,C or G
ggaggacacccacagtttccgcttttgccggcatcgagaggctgcagctctgtttcgctctaaaaaccgctgccgccgctcatctggatcttcatccactgtacgccgtcgccgtcccccagtgctaggggtgggctgagctggagagacctgttgcccagtaaagaagaatacttgtgatggtttgtatatgctcttccctgggagaggcacttttagaaggtgtggccctgttggagtaggtgtgtcactgtgggtgtgggctttaagaccctcatctagctgcctggaagccagtctcccactagcagccttcagatgaagatgtacaactctcagctcctnctgcactaanncctgccaagatgctgccctgctcccaccttgatgacaatggactgaacctctgaacctgtaagcggcccaattaa

SEQ ID NO: 433 - DNA, 427 bp, Homo sapiens
gtcgtgtcactgctgttgctatcctgactggactgaactggactgctggtgtatctgtgaggtgtttgcgaatggattgagctgccactgcctgctgacctgtgaactcaactgctgatttccagacaacacagacaggagttgttgcaaagagcctttatagacaggcccgcgcccccttccccgctcctgtatcatttcttttccattacctctggtgggtggtgggttacaagagaggttaaagcatttaggaaccatcattaaaaacagggtttgacatggaggcgcatgcctttaatcccagcactcaggaggcagaggcaggcggatttctgagttctgagtttgaggccagcctggtctacaaagtgagctccaggacagccagagctataaagagaaaccctgtcttgaaaaaaaaaaa

SEQ ID NO: 434 - DNA, 303 bp, Homo sapiens
  misc_feature (1)...(303): n = A,T,C or G
gcacatgagtgttctgcctgcatggatgactgtacatgcatggctcatgcagtgatgaaggagaccagaagaggtccttgggaatagagttacaaacaattttgaaccaccatgtgggtgctgagaattgaacctatgtcctgtggaagatcagccagtgctcttaaccactgagaaatctctccatcacctattcttgtggtttggtttttctttttctttctttctttcttttttttttttcnananngggtttttttgggtanccctggctgncctggaactaactttgtaaaccaggtt

SEQ ID NO: 435 - DNA, 214 bp, Homo sapiens
  misc_feature (1)...(214): n = A,T,C or G
gaaggagaagaaggaagttgtggaggaggcnnagaatggaagagatgcncctgccaatgggaacgctcaaaatgaggaaaatggggagcaggaggctgacaatgaggtatatgaagaanaggaagaaggtggggaggaagaggaggaggaggaataatgtgactgtnaagatgatgatntannacnataattnntaccatttcgtattgctaat

SEQ ID NO: 436 - DNA, 547 bp, Homo sapiens
agaagagaagcagacacaagatgaaaccctgccaaaaaatggaaggaaacctagaaaaggaggatgagccaaagcctgaggaagagccaaagccggaggaaaagcccgaggaggggcaggaacccgaggaggaggagaaatccgaagaaacttttcgggagaggctgatccggtctctgcaggattttcaggaggatatacacaacaggcacctgagcagtgatgatctgtttagagatgtggaggagctagatgagatcaggaaagtgagaaacaaacttatagtgacgcgttggaaggctaaccgaagccatccttacccctatttaatgtagcttggcttgctttcccttttatctgatgttaccattgcgatctagctttcttttcattagcattttcctgataagacctttgcccatcttcctactttgaatctgttgctgttagtggctttagctgtatctcttgttgtctgtatcttactgttgattatatttgaaccaatctataagtctctggctttaagctttactgatttgtaaaa

SEQ ID NO: 437 - DNA, 258 bp, Homo sapiens
  misc_feature (1)...(258): n = A,T,C or G
ctactgaacccgagagaatgcngccgggaatcangggccccttgcccttcattcatnactagcgttgcaccnttnaaagttgagccttgatcagaaaaaaaagaccctnaaaaaaactgnctgccccttgaaaacttacctacctaaagtacagggataatagcttctttgcccactgtgactctcagcccttaagactgtttggctctgcactaatttttttttattagtctgtaataaaatacctacattttatta

SEQ ID NO: 438 - DNA, 174 bp, Homo sapiens
agggttccaagactgccctttgggattcaaacgggagccgctttggactgactggctgccttcctcctcctccccctcctcccccttctgcttcagatttatttattatatgtaagtacactgtagcagttgtaggacacactagacgagggcaccagatctcattgtgggtgg

SEQ ID NO: 439 - DNA, 364 bp, Homo sapiens
aagaagcctgctcattctgaatttgaacatcggttctgcattactcctgaaagatgtcctgcagtcagtgtccgagcacattcctgccacagcagccttaaatgaagttggggtttacaaactggctcagcaagacgttgagattctgcttaatttgaggacaaattggcctaacactggaaaataatgcatcttcgagaaaagtgtttaacaaagacaagagttgcctttaatcctagcacttgggaggcagaggcagatggatttctgagatcgaggccagcctggtctacaaagtgagttccaggacagccagggccacacagagaaaccctgtcttggaaaacaaacacaaacaaaaaaa

SEQ ID NO: 440 - DNA, 274 bp, Homo sapiens
aggtatttggcccagcgacatcagagacaagaagagacacagatgagagacaagcacatgaaagatgcttaccatccttcgccatggcaaaaagtgaaattaaaaagtcgaggggacattactgtgcatctgatggagacatgaggacccgtagggcttgctggccagccagtctagcccagtcagtaagctccaggttccattgtgcctgtggtcttcaagagctctgcacacccacagacataaaaataaagttcaggtgaaataaaaaaaa

SEQ ID NO: 441 - DNA, 159 bp, Homo sapiens
  misc_feature (1)...(159): n = A,T,C or G
ggtctagatgtatgtgccatgctgggaaccaggcctggatcgtctgcaagagcagccatcggtcttagctgctaactcctctctcagtccatttgaatacgattctgaggtgacngcttccctgtcaccacccttaacatgctctcatcgtaccctctg

SEQ ID NO: 442 - DNA, 282 bp, Homo sapiens
  misc_feature (1)...(282): n = A,T,C or G
atacgacacctggaagttgaatntacagaattgccagctgcccaacatggatncttggaaccaaacctttagaattcaacaaacaaacaacccagggggctggagagatggctcagcactcaagagcactgactgctgctcttccagaggtcctgagttcaattcccagcaaccacatggtggttcacaaccatctgtaatgagttccaatgccctcttctggtgtgtctgaagacagcgacataaaatgaataaatctttttaaaaacccaaaaaaaaaaa

SEQ ID NO: 443 - DNA, 523 bp, Homo sapiens
  misc_feature (1)...(523): n = A,T,C or G
catatgcccacatcangcattcctcggnctcacctgcgctctgacctggggcagcagttagaggaggntccttcttnatcttcctcctctgagactnagcctctgcctgcaggaacatgtatcccagagccagtgggcctnttacaaactactgaagcccctgggcccaaaggtatcaagggcatcaagggtactgctcctgagcacggccagcagacctggcagtcaccctgcaatccctatagcagtgggcaacgtccatcgggactgacttatgctggcctgccacctgtagggcgtggtgatgacattgcccaccactgctgctgctgcccttgctgctcctgctgccactgtcctcgcttctgccgttgtcacagctgttgtgttatctcctagctgactattgaacctccagggctgtgcagcccaggttcctgctcaatgccnaagtgttgctggacatcangagcanccgttgcatgagcatcaccatttctgcctgacaggggacctgtcacca

SEQ ID NO: 444 - DNA, 326 bp, Homo sapiens
  misc_feature (1)...(326): n = A,T,C or G
ggcgaacccccccaacccccagcctgnaacaggctgatccagaccttgaccttgctgccactaaggagattacctagggtggagccttcctgcctagatgactctattgttcagccactgctgctcttctncttcaagacactgctacctgctgagaggaccctgagctattctagagacttcatcctatcctgcaggtcatcacctgcagctggttccaggctccaagaatggattaacgggaatgggccgcccttctcccccccaccccctttataagcacagttttctattaaacattcgagctttgatcaggaaaaaaaaaa

SEQ ID NO: 445 - DNA, 336 bp, Homo sapiens
  misc_feature (1)...(336): n = A,T,C or G
ttgaagcgttccaagactgccctttgggattcaaacgggagccgctttggactgactggctgccttcctcctcctccccctcctcccccttctgcttcagatttatttattatatgtaagtacactgtagcagttgtaggacacactagacgagggcaccagatctcattgtgggtggttgtgaaccacccaccatgtggttgctgggatttgaactcaggatctacanaagagcagtnagggctntaaaccgntgagccatntctccagcctcctgcattccttcttaaggcntgaantgatcccanncataggaagactgacttgcccttcctt

SEQ ID NO: 446 - DNA, 370 bp, Homo sapiens
  misc_feature (1)...(370): n = A,T,C or G
ggtgctgtctgctccgatctcccttatgcttcctggtttgagtccttctgccagtttgctcagtatcgttgctccaaccatgtctactatgccaagaggnnacnntgctcncagncnnncnccatnctatncccnaacactntnaaggangtggaggcttctncagaantggctgacacttccatgaccanctggcattgnganccatgccacagagtgagacctcncanantgtgnaccnnagntcccagccctancttggcagcttgcaagtctgtaactccagtcctgggagatccaacgcccccttctggcctccacaagcactgcatgaatccaggcaaaacacctatacacataaaataaaaaa

SEQ ID NO: 447 - DNA, 260 bp, Homo sapiens
taacagcctcctctatgatcatggcccggctgcatgctgagccacggagaaggagaagaagaagataaaggaggatgagaagggttggggcggtgcccgacctctgaagaggagaggagacaggcgaccatgggagcaagtcttcagcaccacatgatggggactctggagttgccgctcaggctgtctggggtcctggctgactggccaccgtctttctcatcaataaaaacatcgttgtgcattcttaaaaaaaaaaa

SEQ ID NO: 448 - DNA, 158 bp, Homo sapiens; identical to SEQ ID NO: 404

SEQ ID NO: 449 - DNA, 270 bp, Homo sapiens
  misc_feature (1)...(270): n = A,T,C or G
agactctgtcatcggcaagtggagactgtaacangactgggaccctcacatgccgataagcagtcaagaatattttctgggagctggagagatgggctcagcagttaagaacactgactgctcttccggaggtcctgtgttcaaatcccagcaaccacagggtaactcacaaccatctgtaatgagatctgatgccctcttcgggtgtgtctgaagacagctacagtgtccttacatataataaataaataaatctttttttttaaagaa

SEQ ID NO: 450 - DNA, 338 bp, Homo sapiens
  misc_feature (1)...(338): n = A,T,C or G
gttgctcagagaagcacagtcttcaagaccccatacccgaggaggaggaggaggaggaggaggagcccatcggagtggctgtggaggangagcgtttncaccagnagggagccccaanagcatccnataaaagctgtgccattatgtgaacttgtcaagacatggtcgatcttcctcaagctagaancatggagtcctgtatacagtgcagagccttctcagaagcacatgatatttttgtatttcctttatgtgaatttttaagctgcgaatctgatggccttaatttcctttttgacactgaaagttttgtnaaagaaatcctatccatacattat

SEQ ID NO: 451 - DNA, 265 bp, Homo sapiens
  misc_feature (1)...(265): n = A,T,C or G
agcctctcttaacattttccntggcaaatctntcagtgcctggctntatgtggtctcccntcccccagcctgaaacctgcttgctnaggggtggagcttcccgctcantcgttctgccacgcccactgntgnaacctgccgntttgctgtttgnagctacacacgtggtcaccgtgctactgnattccganattatttggcggnaattgggcccntccccnttccttnataacggagtgccaaaatagtaaaaattgaaccttga

SEQ ID NO: 452 - DNA, 240 bp, Homo sapiens
  misc_feature (1)...(240): n = A,T,C or G
gcccgaaaaacaaaaccagaggaaggggtgagagaaaaanntgcaaatggggaactgaaaaattattgaagggctggtgaggtgactcagtggaaaaaggagcttgctgtcaagtctgaagaccagagttcaattcccaggacccacctggtggaagttgncttcaaactgccccatgaatattcaaacacaagcatgtatattcatacaaaataaataaatataatttaaaaaaaaaaa

SEQ ID NO: 453 - DNA, 220 bp, Homo sapiens
  misc_feature (1)...(220): n = A,T,C or G
gggttccaagactgccctttgggattcaaacgggagccgctttggactgactggctgccttcctcctcctccccctcctcccccttctgcttcagatttatttattatatgtaagtacactgtagcagttgtaggacacactagacgagggcaccagatctcttgtgggtggttgngaaccacccaccntgtggttgctgggatttgaactcaggatctt

SEQ ID NO: 454 - DNA, 198 bp, Homo sapiens
cggttccaagactgccctttgggattcaaacgggagccgctttggactgactggctgccttcctcctcctccccctcctcccccttctgcttcagatttatttattatatgtaagtacactgtagcagttgtaggacacactagacgagggcaccagatctcattgtgggtggttgtgaaccacccaccatgtggaag

SEQ ID NO: 455 - DNA, 320 bp, Homo sapiens
agttgaaggcctccagttaagagattacctcaaatctgaaataaggctttggacttgtgaacagtattggaattgttgaagaatatggggacttttgaagttgtcctggacatatgtttgcattataagatgacaatgaaggctgccaggaaaactcagaaagtattgtattaccttttgacttgagttcaatccccaaagccaaagtgtggaaggagagagctgattcctgcaacttcttctgacttctatagcactcacatatatcgggcacatgcatgagtatgcacacacacacacacacacacacacagatcgaa

SEQ ID NO: 456 - DNA, 173 bp, Homo sapiens
tccaagactgccctttgggattcaaacgggagccgctttggactgactggctgccttcctcctcctccccctcctcccccttctgcttcagatttatttattatatgtaagtacactgtagcagttgtaggacacactagacgagggcaccagatctcattgtgggtggttgt

SEQ ID NO: 457 - DNA, 335 bp, Homo sapiens
  misc_feature (1)...(335): n = A,T,C or G
acaggctacacacagccggtggctacatgtggnaacatctncagnggntgttgaagagtccgtggtggcatctnntgcngcaatgnggaatgcctgggctgtcctctgncatggctggcccntggcctgttgaccacagaananancagggtcanagggctcaagcncacagnccccttggggagatcgcacatagcagggttctcaacctgtgggttacaacccctttgagggtcaaacgaccctttcacaagagttacgtattagctatcctggatgtcagatatttacattacaatgtataacagcagcaaaattacagttatgaagtagca

SEQ ID NO: 458 - DNA, 235 bp, Homo sapiens
  misc_feature (1)...(235): n = A,T,C or G
caaagccacccaccctntgacttctatttactttacaatgatgttagccccccncnnntccaaaantnatgacannggggggtttngnctctggncaaacatgacctccagagtttggcccttgcataaaggagaaaattaattccttcagttgttctctgacctccacatgcgtcctgtaacatgggtgtatgcatacacataaacacacatncacacgttgttaaataaataa

SEQ ID NO: 459 - DNA, 173 bp, Homo sapiens
  misc_feature (1)...(173): n = A,T,C or G
gggttccaagactgccctttgggattcaaacgggagccgntttggactgactggctgccttcctcctcctccccctcctnccccttctgcttcagatnnattnattatatgnaagtacactgtagcagttgtaggacacactagacgagggcaccagatctcattgtgggtgg

SEQ ID NO: 460 - DNA, 205 bp, Homo sapiens
gggttccaagactgccctttgggattcaaacgggagccgctttggactgactggctgccttcctcctcctccccctcctcccccttctgcttcagatttatttattatatgtaagtacactgtagcagttgtaggacacactagacgagggcaccagatctcattgtgggtggttgtgaaccacgcaccatgtggttgctgagat

SEQ ID NO: 461 - DNA, 315 bp, Homo sapiens
  misc_feature (1)...(315): n = A,T,C or G
cactgttttgtaactattttgtaaggncacagtccaccagtanctttagggnacagggtnattttatncacancagcagnaaatgnaaaccaaaacaactccacaataaaattcttgngtttcttggggccaagaagtatgnacacgnataagnataaagnacactggccaagncatgtacctccagnagtttggcccttgcataaaggagaaaattaattccttcagttgttctctgacctccacatgcgtcctgtaacatgggtgtatgcatacacataaacacacatccacacgttgttaaataaataaaaa

SEQ ID NO: 462 - DNA, 340 bp, Homo sapiens
ggcactccagttaagagattacctcaaatctgaaataaggctttggacttgtgaacacgtattggaattgttgaagaatatggggacttttgaagttgtcctggacatatgtttgcattataagatgacaatgaaggctgccaggaaaactcagaaagtattgtattaccttttgacttgagttcaatccccaaagccaaagtgtggaaggagagagctgattcctgcaacttcttctgacttctatagcactcacatatatcgggcacatgcatgagtatgcacacacacacacacacacacacacagatcgaaaatagttgtaataaaaaaaattaaa

SEQ ID NO: 463 - DNA, 507 bp, Homo sapiens
  misc_feature (1)...(507): n = A,T,C or G
gatctggtggcttgggtgacagccagtttcctgcacatcccccatgctgaggacatccccaacacagtgactgtgggaaacagagtgggcttcttgctccgaccctacaatttcttcaatgaagatccctctatcttctcccctggcagcgtgtactttgagagggaccaggatgccgggctctgcagcatcaaccctgtggcctgcacccaacagctggcagactgtgtccccaacttaccctccttttcctatgaaggcttataggcctgaggctatggtgaggccccagggtaggagggatggaatgtggagtggagaaatggctcagcgattaagagcacttgactgntcttncagangnccctgnngttnanttccttgcaaccacatggtggntacaaccatctgtaatgggatctgatgctctcttctggtgtgtctgaagacagagacagtgtacccatatacataaaataaatcttttaaaaaattttaaaaaaagaa

SEQ ID NO: 464 - DNA, 128 bp, Homo sapiens
tcagcaaacatcatttaaaaggaaattaatggcgaaaatggggcattgggaaaccatgggggaggggggagactgagagaatgagaatgaataatggcaaaataaataaataaataaataaataaaaa

SEQ ID NO: 465 - DNA, 179 bp, Homo sapiens
tcagggctccaagactgccctttgggattcaaacgggagccgctttggactgactggctgccttcctcctcctccccctcctcccccttctgcttcagatttatttattatatgtaagtacactgtagcagttgtaggacacactagacgagggcaccagatctcattgtgggtggttg

SEQ ID NO: 466 - DNA, 282 bp, Homo sapiens
aatcagactctgtcatcggcaagtggagactgtaacacgactgggaccctcacatgccgataaagcagtcaagaatattttctgggagctggagagatgggctcagcagttaagaacactgactgctcttccggaggtcctgtgttcaaatcccagcaaccacagggtaactcacaaccatctgtaatgagatctgatgccctcttcgggtgtgtctgaagacagctacagtgtccttacatataataaataaataaatctttttttttaaagaataaaaaa

SEQ ID NO: 467 - DNA, 216 bp, Homo sapiens
  misc_feature (1)...(216): n = A,T,C or G
gagggttccaagactgccctttgggattcaaacgggagccgctttggactgactggctgccttcctcctcctccccctcctcccccttctgcttcagatttatttattatatgtaagtacactgtagcagttgtaggacacactagacgagggcaccagatctcattgtgggtggttgtgaaccncccaccatgnggntgccgggatttgcactca

SEQ ID NO: 468 - DNA, 343 bp, Homo sapiens
aagggtctccctgcctagaacctgatatttaacactgagagatccacctggctctgcgccgctaaacacgccacctcgtgctagccaactttgaacttatgattctcttgtacactggtaacttggaagttacctctcgggggctggagagatggctcagtggttaagagactgactgctcttccagaggtcctgagttcaattccaagcacatggtggctcacaaccatctgtaatgggatctgatgccctcttctggtttgtctgaagacagatacagtgtactcgtcacatatataaaataaataaataaaatctttttttaaaaatttaaaaaaaaaaa

SEQ ID NO: 469 - DNA, 165 bp, Homo sapiens
  misc_feature (1)...(165): n = A,T,C or G
gcctccagactgccctttgggattcaaacgggagccgctttggactgactggctgccttcctcctcctccncctnctgnccccttgtgcttcagattnatttattatatggnngtacactgtagcagttgtaggacacactagacgagggcaccagatctcattg

SEQ ID NO: 470 - DNA, 361 bp, Homo sapiens
  misc_feature (1)...(361): n = A,T,C or G
gacgcatcctggactccacaatgaacgggacagttggacctaagtgggaagctgattatcaaagctnancttggggaanatatncnacnaattcccattcataatgaagacattacttacgatgaattagtgctaatgatgcagcgagtattcanaggaaagcttctgagtantgatgaagntacaataaagtataaggatgaaggcatggactgaagaccctcaccctagctgcctggaaatcagtattatgttagcagccttcagatgaagatgtagaactntcanntccttctggatcatgcctgcctggatgctgcatgttcctgccttgatgatantagaatgaacctctgaaccc

SEQ ID NO: 471 - DNA, 165 bp, Homo sapiens
ggttccaagactgccctttgggattcaaacgggagccgctttggactgactggctgccttcctcctcctccccctcctcccccttctgcttcagatttatttattatatgtaagtacactgtagcagttgtaggacacactagacgagggcaccagatctcattg

SEQ ID NO: 472 - DNA, 349 bp, Homo sapiens
gtaaaggcattgaaagagaagattgaatctgaaaaggggaaagatgcctttccggtagcaggtcagaagttaatttatgcaggcaaaatcctcagtgatgatactgctctcaaagaatataaaattgatgagaaaaactttgtggtggttatggtgacaaaacccaaagcagtgacaacagcagtgccagctacaacccagccatcaagtactcccagccccactacagtcagttcttccccagcagtggctgcggcccaggctccagctcccacccctgctctggctcccacttccctctgcctccctagtgctaggattaaaggcatgcactacaaccaaaaaaaaa

SEQ ID NO: 473 - DNA, 424 bp, Homo sapiens
  misc_feature (1)...(424): n = A,T,C or G
gaggaggacctgccttctgctgatgagctggaggactggctggaggacgtgctggagggcgagatcaacacagaggatgacgacgactgatgacgacgatgacgatgatgacgatgatgatgacgactagatgactagtggccgtggcagccgcgtaccagccccacttgctccttacttgttgtacctttctgccatctgtgcccttccccgggctccttgggacactaggtcattctctactacagggccaactgtggtctgcatacagggtgcttgaggtcctggtctccctctccgaggagaaaaggagctgctttttcttagatcccagcccagttctctcatctgactttgctttnttncccccagacctttatctggatctcttnccgggcantnccccatactttaacgggttttc

SEQ ID NO: 474 - DNA, 352 bp, Homo sapiens
ggttgagaagtaccggccacagaccctggccgatctcatttctcaccaggacattctgagtaccaacccttggtgagcacaacttcgtggcagtgggagcactctgctccaaagtggacaggaagtagagagctaaaggggtgggggagcaagcagtatgaccctcaaaggcacgagtttggtgacctgactcctccaatgaggctgtgcctctaaaccagtggctctcaaccttcctaaagatgtggcccttttaatacagttccccatgttgtggtgaccaccccccccaccataaaattatttcattgctacttaataaatgggaattgggtcctgttaaaaaaaaaaa

SEQ ID NO: 475 - DNA, 386 bp, Homo sapiens
gtatttactcaagagaatgcaacctgtgcctacatagaccttcatacatgaacaatcatagcagcttcattcataacagctccaaatggggagcagctcaagtgcccatcaaggtatcctgacctcctgaccgggtccgtgaccttgggaagctgaacaccaacccctcttcacccagaggacgacgccagcggcaggtcatgggagcgcggccctcgcgacggcagatgactgaagctcggcgcctggctctaaccaagctgccccctgagctgctggtgcaggtgctgagccacgtgccgcctcgcgcgttagtgacccgctgccggccagtgtgccgggcctggcgcgacctggtagatggcccaagtatatggctgctgcaa

SEQ ID NO: 476 - DNA, 100 bp, Homo sapiens
gaacaacgaccacgggaaggttgaaggataatcttctaataccagcactttgaatgagaatttgtttctctgccacaaactgatttttttttttaaaaaa

SEQ ID NO: 477 - DNA, 506 bp, Homo sapiens
  misc_feature (1)...(506): n = A,T,C or G
actgagagtaaagacatttccacgtggacacctgatcatgtgcctaccctgactgaggctccccaggcatctntattgngggcagccgtgctacacgctcaactntgagcccccaacagtttgcaggctcccagccccggggtctgggcctnggccccaccatgtcgagcctcggcggtggctcccaggacgccggtggcagtagcagcagcagtaacaccaatagcagcagtggcagtggccaaaaggcaggaggaacagacaaaagtaccgcggtggccgccaccacggcgccgacctccgtggcagacgatgccccaccccctgagcgtcggaacaagagcggtatcatcagtgaacccctcaacaaaaacctggggggcttcccgaccactcttttnantactnttcntttggnaagcaagtggtggcggcggaaacatgatgggggtggagttttgntgacaaggcaacggcagcccgcagcctccctattggccaatggt

SEQ ID NO: 478 - DNA, 100 bp, Homo sapiens
aatcgagatccgagatgaagactgaactttctcctcggcccggggcatgcagggcagggagttgacccaagaagagaagcttcagcttcgaaaaaaaaaa

SEQ ID NO: 479 - DNA, 189 bp, Homo sapiens
cggttccaagactgccctttgggattcaaacgggagccgctttggactgactggctgccttcctcctcctccccctcctcccccttctgcttcagatttatttattatatgtaagtacactgtagcagttgtaggacacactagacgagggcaccagatctcattgtgggtggttgtgaaccacccgac

SEQ ID NO: 480 - DNA, 360 bp, Homo sapiens
  misc_feature (1)...(360): n = A,T,C or G
taccctcagaggccagaagagggtgtcagagcccttgtaactggagtttgacggtcgtgagctgcgcatcttcaccatggcanacgatgatccctacggaactgggcaaatgtttcatttgaacactgctttgactcactcaatatttaatgcagaattatattcaccagaaataccactgtcaacagatggcccataccttcanatnttatancaaccaaaacagaggggatttnnattccgntatgtgtgtgaaggcccatcacacggagggcttcgggagcctctagtgagaagaacaagaaatcctaccccaggtcanaatttgccantntntgngggcctgcaaaggttatccgc

SEQ ID NO: 481 - DNA, 375 bp, Homo sapiens
  misc_feature (1)...(375): n = A,T,C or G
gaaccctaaggactctgcaatatgaataattctntagagaacaccatctcatttgaagagtncatccgagtaaaggcgaggtctgtcccgcaacacaggatgaaggaatttctggactcactggcttctaagggaccagaagctcttcaggagttccagcagactgccaccaccaccatggtgtaccagcagggtgggaactgcatttatncagacagcactgaagtggctgggtctttgcttgaacttgcttgtccagtcacaaccagngttcaaccacaaccatctgtancaagatctgatgccctcttctggagtgtctgaagacagctacagtgtacttacatataataaataaatctttaaaaaaaaaaa

SEQ ID NO: 482 - DNA, 100 bp, Homo sapiens
  misc_feature (1)...(100): n = A,T,C or G
gagccaggaagtaatcaagaaatcaaggagtttgcatccggntacaacgtcaaggttgacatgtacagnangatctgtgtaaatggggaccatcccacca

SEQ ID NO: 483 - DNA, 412 bp, Homo sapiens
  misc_feature (1)...(412): n = A,T,C or G
gtttgtcaggatggtggataagaatatttacatcattcaaggagaaattaacattgttgttggtgccatcaaacgaaatgcccgatggagcacccatataccactggatgaagaacgggatccccttctgcacagtttcagtaacctgaaagaggtcttaaacagtgtgacagacccantggatgtcaaagagaaagaaatggccttataaaattcatttgtgtggagaacttgaagntacttcggaacttgataacttttagaaccatactctgtttccctaaagaacctcctaatttttttaagcctgatagtggtggtgcatgcctttaatcccagcactcaggagtcagagacaggtggatctttgatttgaggctacctggtctncagannaaggtccaaggccagt

SEQ ID NO: 484 - DNA, 350 bp, Homo sapiens
  misc_feature (1)...(350): n = A,T,C or G
gacagaggtttacagnacagatggctgcgtntcagtcccctgctgtaaaaggttctatacctgcaacatcaacagttcagaatgttcttattaatccattgttaattgggtccaaaaacattcttattactactaatatggtatcacaaaatacagccgagtcagcaaatgcactgaaatgaaaacgtgaagacgacgatgatgatgaagatgaagatgaagatgatgatgatgatgatgatgactatgataatatgtagtctaaccacgatgcatgtaacctgtgttcttggacttggatccattgtactacaaattaaaaagcatgttagatgttttaaaaaaaaaaa

SEQ ID NO: 485 - DNA, 165 bp, Homo sapiens
ttgagggatggctactgtcacctgaccactaacggacttcgagctggcgacatcaaaagaagcctctatttcaatattccaggcctgagaagcgttatctacagagagaaaggagttccaggacagccagggctacaagaagaaaccctgcctcaaaaaaaaaaa

SEQ ID NO: 486 - DNA, 327 bp, Homo sapiens
  misc_feature (1)...(327): n = A,T,C or G
cccctaccacttccttcataactggaagtngcaccantaaacanntgagccttgatcatcacaaaaaacacgagantacanccactgtcaaagtggtgactagccactctgtggacaagaaaacaagtcaccccaatagaggtgggtccaagaggcgggactaanaaaacaaagcctgccnggccgggtgtggtggcgcacgcctttagtcctggcctttgggaggcagaggcaggcggatttctgagttcgaggccagcctggtctacagagtgagttccaggacagccagagctacatagagaaaccctgtctcaaaaaaaaaaa

SEQ ID NO: 487 - DNA, 799 bp, Homo sapiens
  misc_feature (1)...(799): n = A,T,C or G
aaacaccgcctgagagcancttaangaggcctacnantcangacacttgatgataccacaccagntccaggtgggagatgcaggtctcgtctgacgacatcnttctgagaatcngaanccttgntaaatnggcncttgnatcgngctactnaccacccacactgctgtcaaagaanaaggcatntattntgcctttnacgntctagcgagcntctgannaatnaaccncnttgattgaccactctcatttntactctgatagaccctctaataatnttgctcttactgctgacgtgtggcccactantncttaataatctaatgacctttgttagagagaggattggtgctgnccagntgntagtattaanacaacnatnccagtctctgcataaccttgaaaaagaggttgcagtttagttctaagattagaactagtaactagaagaagtggggaatgaaagatcctggcagaatgtaaaaggacacagaagccctgaaattggcaagatagacgtcagtgttagcagaactagcttcactgatttagaaacntagaggtgcacaatgctttgggccactccttgaacctgngngtcttggcaatgttctgaccaaggtgtgtgcccattggntgganccttnattgaagactctttcccttggaccccntncccattaccccattttctttggggaattngnncnttggnttaanaatcntgggaaaaatcccccttaaatnttccccccttnttncnttttncccccccttggannggccctttttaaaaaacct

SEQ ID NO: 488 - DNA, 440 bp, Homo sapiens
  misc_feature (1)...(440): n = A,T,C or G
gggtcccgacacccctttgaaaaccccctttttgtaaaagccaggcttggtagtgggcacctgtcatcccagcactcaggaggcagggtcaggaggattacaggttcaaagccagtctggtctatattagaaaaagaaaactgtccttttgctaaagaaaaattaaatgaatttttagggctgaaatctgtgggtaagatggagtctggagctttcctcttggaacagttaaccgaagaccctcatgggcaaggacatccgcttgactccccactcaccatcaggccacacttttaaagaaaaattgttctctaaccaggattgtaacaaatgtgtaaatagtatttctgagttgaaagtcgatggtgcaaatatgtatataacgtactgnatttttacaatgatcgtcgcatggctctccacccctttttggactcaag

SEQ ID NO: 489 - DNA, 435 bp, Homo sapiens
  misc_feature (1)...(435): n = A,T,C or G
cttcccttgtcgctgctgaagacagcgcagaatcaccccatggtaagcactctgggccacctcccttcatgtgcccacagctcagtcttttgcagntcatgattgaaggcctggcaagatggctcaatgggtaaaggtgcttgctgccaagccgaaggacctgagttcaatccccaggacccatgtgatgatggaggggtncatgacttccctgaagntgttctctgccctgtntgcacacagacagaatggcaaatgcaatacaaaggaaaacgttcacaaagaaatctatagccgggcatggtggtgcacgcctttaatccccgcacttgggaggcagaggcaggcgaatttctgagttcgaggccancctggtctacaaagtgagtgccangacagccagggctacacagagaaaccctgtctcaaaaaaaa

SEQ ID NO: 490 - DNA, 204 bp, Homo sapiens
aggagcacatgaaggataaggataaggaccgggaaaagtctaagcatagcaacagtgaacataaagattctgaaaagaaacacaaagagaaagagaaaaccaaacacaaagatggcagctcagaaaaacataaagacaaacataaagacagagacaaggaaagacgaaaggaggaaaagattagagctgctggggatgcaaaaa

SEQ ID NO: 491 - DNA, 292 bp, Homo sapiens
  misc_feature (1)...(292): n = A,T,C or G
gggttccaagactgccctttggtattcaaacgggagccgctttggactgactggctgccttcctcctcctccccctcctcccccttctgcttcagatttatttattatatgtaagtacactgtagcagttgtaggacacactagacgagggcaccagatctcattgtgggtggttgtgaaccacccaccatgtggtngcngggantcgaactnaggancnncataatagcacncanggctcnaaatnncttgagccntctcttcnnnctntctgnattccttgttatggcat

SEQ ID NO: 492 - DNA, 175 bp, Homo sapiens
  misc_feature (1)...(175): n = A,T,C or G
ggttccaagactgccctttgggattcaaacgggagccgctttggactgactggctgccttcctcctcctccccctcctcccccttctgcttcanatttatttattatatgtaagtacactgtancagttgtaggacacactagacgagggcaccagatctcattgtgggtggttg

SEQ ID NO: 493 - DNA, 158 bp, Homo sapiens
  misc_feature (1)...(158): n = A,T,C or G
tgccctttgggattcaaacgggagccgctttggactgactgnctgncttnctcctcctcnccctcctnccccttctgcttnanatttattnatnatatgtaagtacactgtancagttgtaggacacactagacganggcaccagatctcattgtggg

SEQ ID NO: 494 - DNA, 283 bp, Homo sapiens
actgtactgactgctggtgagactgctgcaatggctcgtcagtgtaccccgctcctccagcagccagcgcactgcctcaataccctcgttcaaggtcaccagctgctgcaggatcttcacatcgatagctcgcaggcactctggaggtggaaggaagaggatcagaagttcaaggccattctcagctatgttggcagttcaagaccagccggagcttcatgaaaccctgttttaaaattaatgaaataaaataataaaataaaacaagatttaaaaaaaaaaa

SEQ ID NO: 495 - DNA, 176 bp, Homo sapiens
ggttccaagactgccctttggtattcaaacgggagccgctttggactgactggctgccttcctcctcctccccctcctcccccttctgcttcagatttatttattatatgtaagtacactgtagcagttgtaggacacactagacgagggcaccagatctcattgtgggtggttgt

SEQ ID NO: 496 - DNA, 156 bp, Homo sapiens
ggtttcttctctgtgtagccctggctgtcctggaactcactctgtagaccatgctggcctcgaactcagaaatcctcctcgtgtgccaccacttcccggccgggtcatagcttttttaacctttaaataaagagcttttgttgggaaaaaaaaaaa

SEQ ID NO: 497 - DNA, 251 bp, Homo sapiens
  misc_feature (1)...(251): n = A,T,C or G
ggagttccaatgaattcactcaggtttctctttgaaggtcagagaattgctgataatcatactccgaaagaantgngnntganaaagtatganggctggagagatggttcagnanntaanancactgactgctcttctggaggttcaattcccagcaaccacatggnggcttataaccatatataatggagnctgatgcactctcctgggtgtgtgnctgaagacagctacagtgtactcatataaatata

SEQ ID NO: 498 - DNA, 220 bp, Homo sapiens
gatcacttcatggatttgcctcacgtacctatgtttgttaatttcctgtgtcgttcccaagatcacgtaaaaccctctgagcattattgacctccctcccagcaaccacatggtggctcacaaccacctgtaacagagatctgatgccctcttctggtgcgtctgaagacagctacagtgtacttacatataataaataaataaatcttaaaaaaaaaaa

SEQ ID NO: 499 - DNA, 269 bp, Homo sapiens
  misc_feature (1)...(269): n = A,T,C or G
ggtgcatgatgagttcattgttgcagntgtacacgactcactcatgaaaaggatgtcagagaccccattacagatggttgtgagccaccatgtggntgctggaattgaactcaggacctntggaccttaacctctgagccatctccccagccccaaaacaccaaatgactctaccaaatcatcaagaagagaattcctctggcttcggctcaaggtccatgcttgttcacctctggatattaaatgggcgataattccaaaaaaaaaaa

SEQ ID NO: 500 - DNA, 322 bp, Homo sapiens
gttgggttaacggcatggagaacagtcacccccaccaccaccaccagcagcccccgccgcagcccggcccttcgggcgagaggaggaaccaccattggagaagttacaagttgatgattgacccggctctgaaaaaggggcaccataaactgtaccgctacgatgggcagcatttcagcctggccgtgagtagccggcgcgccttcccgccacccccacccacccccggtggagcccccagacaagaggcgaacggagggggacccctcttccaggacagccagggctatacagagaaaccctgtctccaaaggaaaaaaaa

SEQ ID NO: 501 - DNA, 186 bp, Homo sapiens
ggttccaagactgccctttggtattcaaacgggagccgctttggactgactggctgccttcctcctcctccccctcctcccccttctgcttcagatttatttattatatgtaagtacactgtagcagttgtaggacacactagacgagggcaccagatctcattgtgggtggttgtgaaccaccca

SEQ ID NO: 502 - DNA, 406 bp, Homo sapiens
  misc_feature (1)...(406): n = A,T,C or G
gtctactaacccaactctactgaactggcctgcccctgtatgcatgaagtgtctctgcgagtggatcgagctggcagtgcctgctgacctgtgaactgaactgctggtttccagacaacacagatgggagttgctccaaagaacctttctgaacatgtacacttcccccgtatcctttcttttctactatctcaggtgggtggngggctataagggaggttaagacatttaagaaccgtcattaaaaataaggattgaggggctggtaagatggctctgcaggtgagagcactgactgcttttncgaaggtcctgagttcaaatcccancaatnacacggtggctcacaaccatctgtaatgggatctgnannccctnaatctggtcntttgaagacagcttacaa

SEQ ID NO: 503 - DNA, 490 bp, Homo sapiens
  misc_feature (1)...(490): n = A,T,C or G
gaagctgcagtgcttggttcgggtcntatgttcaggggaccantatttagataaagaagaaaatagcaaaattatggatgttgtgttccagtggcttacaacaggagacatccacctcaaccagatcgatgctgaggacccagaggtnggagactgcatcatagaaatggangatggctcannttcttagaaccatttncaaagggacaganagatctntttcaactcacccctaanacnnttggaanacagnttggaganntggctcataggctaaaaatactggctgttcntccagaaggcccaacaaccacatggtggnttacaaccatcctttangggatcctgggccctctttnggggggccccccgtctnttaatttaaatnancggtttttttttnttgtttccggggggngggcgncccctccccttggaacttntttnncctnanttgaacnttttttcttttggaaaagggcccccttgg

SEQ ID NO: 504 - DNA, 290 bp, Homo sapiens
ggttccatggtgacggccacacccaccccgctgcggccagatgtcatgcgggtcacctcactccagggctggggatgagaccttaaaccctggattcaagaaagagaccagaggactggagagatggctcagtggttaagagtaccaacggaaggtcctgagttcaaatcccagcaaacacatggtggctcacaaccacccataatgagatctgccgccctcttctggtgtgtctgaagactgctacagtgtacttatacacataaataaaatctttttaaaaagaaaaa

SEQ ID NO: 505 - DNA, 256 bp, Homo sapiens
  misc_feature (1)...(256): n = A,T,C or G
ggttccaagactgcccttcggtattcaaacgggagccgctttggactgactggctgccttcctcctcctccccctcctcccccttctgcttcagatttatttattatatgtaagtacactgtagcagttgtaggacacactagacgagggcaccaggtctcattgtgggtggttgtgaaccacccaccatgtggttgctgggatttgaactcaggatcttcanaagagcantcagggntctaaaccgctgagccat

SEQ ID NO: 506 - DNA, 327 bp, Homo sapiens
gtctccatatgctcagtcaaatctccataactgtaaatcaacactaagagcactggatagttaaggtcaaggagactctcacaaaggatccagaaggtgtagtccagattaaggtgtgttccaccacacctttaatcccggatgaccttgaactcggagatttaatcttctggaatccatagccactatgcctcaagatctccataccaagatccagatcagaatcttctatctccaagcctccagataagggtacctggtgagccttccaattctggattgtagtccattccaaataaaatcaagttgacaaccagaaaaaaaaaa

SEQ ID NO: 507 - DNA, 301 bp, Homo sapiens
  misc_feature (1)...(301): n = A,T,C or G
tccaagactgccctttgggattcaaacgggagccgntttggactgactggctgccttactgctcctccccctcctnccccttctgcttcagatntatntattatatgtaagtacactgtagcagttgtaggacacactagacnagggcaccagatctcattgtgggtggttgcaaacnnangacannntagacganggcaccaganctcattntgggnggangagcatncanggctctnaaccgctnagcnatntntccagnctcctgcattncttcttaaggcatgaatgatccagcata

SEQ ID NO: 508 - DNA, 141 bp, Homo sapiens
gccactcgcaaacgacctgtcttctcacgctctctctctctctgtttctcactctgtcctctctctgtctctatcctatactaacttgtttcaaattggaagtgaggatatgtattgcccaagggattaaataaacaaaaa

SEQ ID NO: 509 - DNA, 349 bp, Homo sapiens
gtgagccctatttctagagacagctgctgctgaccctgtaactcaaaggacaaactagctggctaaactcattcttggtactggtgttggattattctagaggttggatatgagcctaggtggcctgctggcctaggaggaggattgaggtcactttcttgcagttgcctttaagaatgtgtggaatcggggctggtgagatggctcagtgggtaagagcacccgactgctcttccaaaggtccgaagttcaaatcccaagcaaccacatggtggctcacaaccatccgtaatgagatcttgactccctctttttggagggtctgaaaacaagctacagttgctcttac

SEQ ID NO: 510 - DNA, 238 bp, Homo sapiens
cctgaaacctggctgctcaggtttcactgttatcgggaagagagcatgtggtggagcctgccgccctatcattctgccactcccactgctgctgcctgctgcctagctgttccggagccaaacacgtggtcacctgcaactggactcgtaggatgatttggcaggaatgggccccttccccttcttcataacccagtgtctggaatagtaaaatcgaaccttgatcagaaaaaaaaaa

SEQ ID NO: 511 - DNA, 304 bp, Homo sapiens
ggagaaactcactcgccaaacaacgtctcgtggtatcctggctgactctggccgcttcagcagagcctggctgttcctgctggattgtgctactgctacagattcatgtttggtgtttgctattgaactgggctgcttatatcctgacacggaagagtggaatcgcccaaagcaagtacttctaatcaggtccacaactccctttgcctttaaccttgctttttccctacctctggttggtgggctaaaagggagggttaagaaccccaaataaagtcagttttgaaaaacctaaaaaaaaaaa

SEQ ID NO: 512 - DNA, 250 bp, Homo sapiens
  misc_feature (1)...(250): n = A,T,C or G
gaccttgttggaagaagtgtgtcattgtggtcatggactttaagacctgcancctagctncctggaagccaatctttacctagccgcctntgaaacagctcctnctgcaccatgcctgnctggacgctgncatgcttcnccttgatgataatggactgaatctntgaacctgggcaaagagccnatggggagaagagaatcttnangctctgancatccaggagggtgaagatgttaccatgaactgcag

SEQ ID NO: 513 - DNA, 334 bp, Homo sapiens
atctaaaaaaactcaaagcaatgtccctaagaagccacttgaaaattcctagatggcctgggagttagaagcatgaaacacagcctcaaaaccaaaaccaaaaagcgggctacaggtataaaatgagtgttaaagaagtttgaaatagggctggtgagatggctcagtgggtaagagccgactgctcttccgaaggtccgaagttcaaatcccagcaaccacatggtggctcacaaccacccataatgagatctgatgccctcttctggtgcggctgaagacagctacagtgtacttacatataataaataaataaatcttttaaaaaaaaaaa

SEQ ID NO: 514 - DNA, 182 bp, Homo sapiens
ggttccaagactgccctttgggattcaaacgggagccgctttggactgactggctgccttcctcctcctccccctcctcccccttctgcttcagatttatttattatatgtaagtacacttgtagcagttgtaggacacactagaccgagggcaccagatctcattggtgggggtgggttgg

SEQ ID NO: 515 - DNA, 337 bp, Homo sapiens
  misc_feature (1)...(337): n = A,T,C or G
gtgctgggattgcaggcatgtggccactgtgacaggtttcctgtgctgtgccgaggcccgggcccagcgcctcgtgcacactagagaaaattctgcatactgacccacatccccagctctacccgtgtatatttctagtcattctttaaacccaagcaaatgtgtagagtctcctatgctgagatgttttttgccactaccagacatgtaggctatcatttgacgtctttattccctgagagaaaacttcttttctgtatttatgaactttattattgagaatcactgntaacctttctgccaaattaaagacacttgtgtctctgtttacacggac

SEQ ID NO: 516 - DNA, 377 bp, Homo sapiens
  misc_feature (1)...(377): n = A,T,C or G
actctagaccatgtgcctaggtagnttttnccttctccgcagctctgcttccccagcancgctcaccacacccttgttttgagaacctcactaagtctggagctcanagaaatgangaaggtggatggagactgactcatgngcttgaaaccatcaaattgttcaagatcatcaagggactgagcctaaggctctgtcggaggagggagaagccactgaaacagggggacccaggactcacatggtggctcgtaaccatctgttactctaacatccaattctgacctgtaggcgccagtcatctacaagatgcatagacacatgtaggcaaaacacttatacacataaaataaaactgaaaacaagaatttaaaaaa

SEQ ID NO: 517 - DNA, 354 bp, Homo sapiens
  misc_feature (1)...(354): n = A,T,C or G
gtctttttccccttcctttctgtggacacagnacagctcttcggttncaggattgtgctggtcaattattttctcctacttccatgttatcaagactacttctacatctttttcactgtatgtatatatgagtgaaattatttagagcattatttctaaaaaatgtatttccagctctaaaataggttgagattatcatgaacatttgttgccgggcagtggtggcacacgcctttaatcccagcacttgggaggcagaggcaggcggatttctgagttcgaggccagcctggtctacagagtaagttccaggacagccagggctacacagagaaaccctgtctcgaaaaaaca

SEQ ID NO: 518 - DNA, 669 bp, Homo sapiens
  misc_feature (1)...(669): n = A,T,C or G
aagcctgaggttgagctggaaccggcttcgaatctgccgcttgggagagatgagagggacgggggctgactgctgctggaccgactcgctcagctccttcaggtccatctcggccttgcttcgatctggaagacaccagtatagcctcaatcagaccaggttctcacactccaccacccaccactcagggtttctctgtggagccctggctacactggaactcactctgcagaccaggctggcttcagactcagatacgtgtctgcctctgccttctgagagctgggattaaaggcctgtgccaccaccacccagttcacatgaaatttaaacacgtccgcccgtaactctagttctgggcaatctgacatcctcttctggcttccgtgggcaacgcatgcacgtggtgtgcctatccacgcattggatctagatgttcgtgtgcataaatgcctttaaaaataagctttacacataaataagagcggaggagtttgcgcctggcctcaaatgctgctcctgacgagaagcacctgactcctggagtaaacatggattcaagtcctggagtggacgcccctttccttntgggaaatggacccggagcagcaattagcntacctatctgctaggtcaagcacacaacaccncaaattaaggaaaaaaaaa

SEQ ID NO: 519 - DNA, 336 bp, Homo sapiens
ttgagggtcatctgtctttgttgtctgagatgcaagagtcacaggagaagtcatcaccacggtctgcgggagagacgtggcagacggcgtggtacggatctgatctacaactgatggccaactagtgacacccagatgactgtcacattcacgactcaggtatcgaaggatgttccagcccctccctactacctcccaccacagggtatcactatgtagcctggctgtcttggaactcactacatagaccagcttggtctcgaactacagagatctacctgcctctgcttccggagtgctgggattaaaggctactgagccagtcaaaaaaaaaaa

SEQ ID NO: 520 - DNA, 582 bp, Homo sapiens; identical to SEQ ID NO: 10
  misc_feature (1)...(582): n = A,T,C or G

SEQ ID NO: 521 - DNA, 258 bp, Homo sapiens
  misc_feature (1)...(258): n = A,T,C or G
cctctacatacgagacagctctgacaggctgagataggaatgcctttttttgntatctattttttttaatgtttttattaggnattttcttcntttacatttccatgagctatcccaaaagtcccccaatnncccctccccaggaatgccttttngtggccaanaatctngntgggnnctgttagtgtnatgattntatncactgtaaagatatggctctgtatttcttgcatgcctaaagcaccttctgattgatta

SEQ ID NO: 522 - DNA, 275 bp, Homo sapiens
  misc_feature (1)...(275): n = A,T,C or G
aagggagaccctcactcaagcactcaagncnnggnacngccgcggacccangangacnctgagaccgtactcgaaatgtataangagatagctctaatnttanagcgagtnntcnacctnctganggacccgatattgttgncttagtaccatancctggactgcgtttatcctttttctaatanaagctactaacttattaaggatgcagggcccaaaagtaagcnaaagcatnagtggaatttaaaggtcctgntatattggaaaggaaagtg

SEQ ID NO: 523 - DNA, 288 bp, Homo sapiens
  misc_feature (1)...(288): n = A,T,C or G
gactgagatgatggatcacatgggtggtgatgaggatgtagatttaccagaagtagatggagcangatgatgattcacaagacagtgatgatgaaaagatgccagatctggagtaagggctgttgtcatcgcctggattttgagaaaggaaaataacttctgcaagatttcacaattgagaaaacccctgagtcgatagctctaaaggcagatatgctgtacttgcctcctctaacccagttgtcaacctttttttttctttttcttttttttctttttttttttttg

SEQ ID NO: 524 - DNA, 190 bp, Homo sapiens
  misc_feature (1)...(190): n = A,T,C or G
gaactgagggagcccgaacctcagctgncatggcgtcacagcatngggctgcgcatgcatgctcatgcgggagcaggcccagcaggaggagcatgcgagagcgcatgcannagcaggctgtcatgcattatatgcaacagcagcagcancagcagcagcagctgggtgggccccccaccccagacatcaa

SEQ ID NO: 525 - DNA, 226 bp, Homo sapiens
  misc_feature (1)...(226): n = A,T,C or G
ggtgtcccataggtctccgtgcgactaggaggggcagnggtggcggcggtggcagcagcggcagcggcggcggcggcagcagcagcagcagcagctagcaacctggtcagggtacgctctccatccacagagatgagccgtcaggctgctacagcattatccactggcacctcaaagtgtccaccatcccagagggtacctgccttgactgacacaactgcatgca

SEQ ID NO: 526 - DNA, 401 bp, Homo sapiens
  misc_feature (1)...(401): n = A,T,C or G
gactgaggcctgaagggaaagatttcagcattcatcggcttgtcctgggtaagctgaacaaagtctggtttttgttgtgtgtggnttttccttccttcctttctttttctttctttccttttttctttctttctttttttaaacttgggaccaccaagttgtaaagatgtatgtttttacctggcagttgttccactggtgaactgtcaagttgagaaanagtggattgctagnttgtgttngnttttaanattaaattaatccttgataaaagttgcttttttangggttagnctttgaccactatagtttgatgccatctccattttggttgacctgtctcaccatcaggcctgntactctccatgactaactgngtaagtgcttataatggaataaat

SEQ ID NO: 527 - DNA, 100 bp, Homo sapiens
  misc_feature (1)...(100): n = A,T,C or G
gacttcaggatgcattngacagtgactgngaaactggnaggatcatgccnaacaattatnaaaatggaaantacagtgactaccaggaaacataaaaaaa

SEQ ID NO: 528 - DNA, 195 bp, Homo sapiens
gaactgaggtgaagcactggtggaaggaaaagaacacgcaggagcgaccagggactgagcgagtggagttgaccggagcaagaagaggtcctaaaaattcaattcccaacaaccacatgaaggctcacaaccatctgtacagctacaagtgtactcacatacataaaataatgaataaataaatatttagaatga

SEQ ID NO: 529 - DNA, 216 bp, Homo sapiens
gactgagactctcagcgttctcatctctcctccttcaccatgaagctgatggacaaattccactctcccaaaatcaaggtgagatggctcagcaggtaagagcacccgactgctcttccgaaggtcctgagttcaaatcccagcaaccacatggtggatcacaaccatccctaacgagatctgactccctcttctggtgtgtctgaagacagctag

SEQ ID NO: 530 - DNA, 348 bp, Homo sapiens
cttcaagaagctctactgcctgagggccactggctggaagaaccaatttctcttacacaggttccaggtgtgcatgtcgggcatccctgtgggtgtttgtggtcggctgtctgtccatgctgctataccccagtgtgctctttgatccagtcccgaactacagggagccttgtgtacacgcctggcttgttcctctgagcgcagccttcaccccagctcaccacaccagcctggaacattcgcccatctttctccgcgcttgacaaggggccaccagagtcaccctacgcaaaataaataaataaataaataaataaataaataaataaaatacccgaaaaaaaaaaa

SEQ ID NO: 531 - DNA, 448 bp, Homo sapiens
  misc_feature (1)...(448): n = A,T,C or G
gactgagctacggagtcaaggccaagtgagggggaccagtgcggcctgtgatgactgaagccaccagcgtctcagtgttggacgtttccagtgtgtgtctgacgattcgagcacacgtgtgcacacacacggacggacacacacagacacacacacacacatattctcacacacttatgcgtgtgtgaatatgtgtgtggatgtctgtagctgtatgtaaagcacatatggctacaggtctagatacacacatgagtgtatatatatatgtatgtccatgctagatacacacacgagtgtatatatatgtatgtacatgctagatgcacacatgagtgtatatatatgtatgtacatgtaaagatcgaagggagcagggcgttttctccaaagtactggacctggctttaaccaaaattcttaaggaaaatntttcaatataaaaccc

SEQ ID NO: 532 - DNA, 462 bp, Homo sapiens
  misc_feature (1)...(462): n = A,T,C or G
ctgagccagcaagcacatctgttggagcctacttcttcaggattacagtttatacacgaagaccagctgaaacacccagactgcagactcacgcccactggaagcctacctcttcaggattgcagtttatacagagggccagctgaaacacctagcctcgtggaactagactcttggacttcccatttacagctgtccattgttggnncctgtttccangtccctgcatgggttactgtcccgantncccttaaggatatgctgtgatatngcatngtnggccanataaaccttttcctgaccaatntgcanatagntgnnctagttctgnacttcctctttggtctggctgttggattatggtccacagtgaggaccanacnnagacacagtgaaaggctacttnctggctggaangggacatggtgtggtgggtcanntgggggcatcctttgttttcca

SEQ ID NO: 533 - DNA, 391 bp, Homo sapiens
  misc_feature (1)...(391): n = A,T,C or G
ctgcttcagcaggatggagcatcantgagatggntcagcaggaacgcaagcagcagcaggagctgcgcttggccttgaagcaggagcgccgggctcaggcacagcagggccatcggccatacttcctgaagaaatctgagcagcggcagctggccttggctgagaagttcaaggagctgagacgcagcaagaagctggagagtttcctgagtcgaaagaggcggcggaacgcaggcaaggacaggaggcacctcccgctgagcaaggagtagtaagaactgtcccaggagacctggatctgtgggaacggggcttggcttgcccggctctggatctttnccttgctcaaaaatgagcttgatgactaccactggcctaagctgacttggaa

SEQ ID NO: 534 - DNA, 574 bp, Homo sapiens
  misc_feature (1)...(574): n = A,T,C or G
aagacggatgctccccattctgatgtgaaggatgangaagggacngnagaanagncnnccncnnnntttanacngactancanganaancttgaagagaaacacnngagtgatgctgaagaagatggtgttactggcagtcaagatgaggaagatagcaagcctaaagcagaggaggatgaaattttgaacagatcgccaagaaacagaaagccacgaagagagtgaaacaatctttaagaacttgatctgtgatttcctctccctccccttcccctgcaaatgtggtcctaggagagggcctggtgtaccttangtgggagctcaaaacctcaagatgtcaccatcaacaggttccagtgaatactagcctgtaattttaaacatctagcagtaaataattgcagttgtaatgtaaaggaccctgtttctgtagaaaggaaaacatttaacataatggttgngaaatgtaccatgaaacactaactagngttttggttgnttttaaaanttttccagggnggctttttttttttttcccttttccctttttttttttttttttttaaaaaaaa

SEQ ID NO: 535 - DNA, 203 bp, Homo sapiens
  misc_feature (1)...(203): n = A,T,C or G
actcactatgaagccnnagatgaccttgaacttctgatcctctcacctccatccctgagtgctgggactgctggtatgtgccgttatgngtgtgctgttgggagattganctcaaggcctctcccatgctatgcaagcaccctaccaactgagctatatccccagccttcccaccttanagnggtatattgtactgaggatta

SEQ ID NO: 536 - DNA, 270 bp, Homo sapiens
  misc_feature (1)...(270): n = A,T,C or G
gactgagattctcacaaacacaaagataaacacaaagatcgagaacaccggcataaaggagcacaagaaggataaggataaggaccgggaaaagtctaagcatagcaacagtgaacatanagattctgaaaagaaacacacagagaaagagaaaaccaaacacaatagatggcagctcacgaaaaacataangacaaacataaagacagagacaaggaaagacgaaaggaggaaaagattagagctgctggggatgctaaaataaaaaaa

SEQ ID NO: 537 - DNA, 342 bp, Homo sapiens
  misc_feature (1)...(342): n = A,T,C or G
ctgagagagattcagcctcaaagacatcaaagccataagacactatgtgtaaggtcaatgggatctttgggaacaaaactgattcggaaaagacacctcatcttatgggagctgggcctctgtgtcacctggaagagcaaacacatcatttaagaatccatatgccaacaaggttttgctgaaaggaccccgatatagctgtcttgtgtgaggctatgccagtgcctgncaaatacagaagnggatgctcacagtcatctattggatggaacacagggcccccaatggaggagctngagaaagcacccaaggagctgaaggggtctacaaccctattggttg

SEQ ID NO: 538 - DNA, 331 bp, Homo sapiens
  misc_feature (1)...(331): n = A,T,C or G
actgaggtgactccanngaatgggtcattccatctccanaggggtnagnnacccaccagctgaaaactgctttactaaattggtctgcatggctggcctacaattcaaagatctgcctgtttctgcctcccgagngccgggatttaaaggcatgtgttgggctggagagatggctcaacggttaagagcacagactgctcttccagaggtcgtgagattctgactccttcctcangcatcctgataaagatgttcgtttactggtggcttgctgccttgctgatattttcaggatttatgctcctgaggctccttacacgtcgtgagatcc

SEQ ID NO: 539 - DNA, 353 bp, Homo sapiens
  misc_feature (1)...(353): n = A,T,C or G
tcaaacgggagccgcttnggactgactgnctgccttcctcctnctccccctcctcccccttctgcttcagatttatttattatatgtaagtacactgtagcagttgtaggacacactagacgagggcaccagatctcattgtgggtggttgtgaaccacccaccatgtggtngntgggattnganctcangatctttanaagagcagtcngggntctaaacngctgagccatntttccagnctcctgcatttcttcttaaggcatgaaatgatcncanaatggnacgacagtcttgnnttnttttcctttttagaananattttttccctttttncactcattatactgtatt

SEQ ID NO: 540 - DNA, 327 bp, Homo sapiens
  misc_feature (1)...(327): n = A,T,C or G
tgagatcaacttgtgataatgctgccattgagagaaactcacccaacagctgctcatgaggtcctgcagaagtngcctcttccattgccttgcctcaggatggntggtaaacctggcnattncttcangattgaactacagctgcctggngtctgcctgccaagaggactggtctgcagctgctgaattgtatttgatgtttgctacaggactgacctgctgcccaagaagatcaagcttgcccccaaagaactactgatgaacaggctcacttcccctatatcctaataaattttctcttctactacctttgatgggtagtgggct

SEQ ID NO: 541 - DNA, 235 bp, Homo sapiens
  misc_feature (1)...(235): n = A,T,C or G
actgagaaagtctcgggctggtgagatggctcagtgggtaagagcacccgactgctcttccgaaggtccgaagttcaaatcccagcaaccacatggtggctcacaaccatccgtgagatgccaggacttggaaggtggannccaaactggntcctgaacaaacagaaggatgtgagngatgggaagttcanccaggntctggccaacggtctagacaacaagctgcgtgagatga

SEQ ID NO: 542 - DNA, 325 bp, Homo sapiens
  misc_feature (1)...(325): n = A,T,C or G
atggcacaattcaatgaaactgactttctanagaanccaagagttggggctgnagagatggctcagtggttnagagcactgactgctcttcnatgacgtcctgagtgtcaattgccagcanccacatggtggttcncancagatncatncctgnagatcgcacatgcccnctnctggtgngtctgaagncantctccnnctnacttgcatannntnaaaccttaagtgtttggcatgaggctttaacagacacaatctggagtgnctatgttttacccaagangcccaaaaaagtancatttgattgcctagagtggatcataaa

SEQ ID NO: 543 - DNA, 280 bp, Homo sapiens
gctggcgacatcggccctcgtctgacccaggaacgctaaggaaggcacaatgcggcgctgggtgaagatgcttcatagaggagaggagtccctgaagatgcagagcactgtggcagcatcagaagctgacaatgaccaattgagagcggccagcagagccagtcctcttacagctgcagaactcacggtgtgccagtcaatggccatttggcttttgaagcaaattgggaaagtgtaaacgcttgataaatagttgcctcttgagtgaaaatgaaaaaaa

SEQ ID NO: 544 - DNA, 410 bp, Homo sapiens
  misc_feature (1)...(410): n = A,T,C or G
gtggctgccaatttgatgtaaactccctgctatgacgcttaactgtctggaggagaagtacaagttggactaggaacagattgatccctccacgtcagcctcctggccacccgagactcacatcttgtcagagaaacacaatgggctcatttagctgtacattgaactggtggtcttctaagagaatgtgatgataataagactttaaggtaaaagttaagaactggggctgggggctggagagatggctcagcagttatagagcactgactgctcttctgaaggtcctgagttcaaatcccagcaaccacatggnggctcacaaccatctgtaatgagatctggcaccttcttctggngtgtctgaagacagctacagtgtacttacatataataaataaataaatctt

SEQ ID NO: 545 - DNA, 290 bp, Homo sapiens
gactgagatttaccttcaagactgctgaaattttaactacccaagatgcctgtccctcccccaccagcacccccaccgccaccaacatttgcactcgctaacactgagaagcccaccttgaacaagacagagcaggctgggaggaatgctcttctctctgacatcagcaaagggaagaagctaaagaagacggtcaccaatgacagaagtgccccaatattggacaaaccaaagggagccggcgccagtgctggtggctatggtggaggcggcggaggtggtggtggagg

SEQ ID NO: 546 - DNA, 287 bp, Homo sapiens
  misc_feature (1)...(287): n = A,T,C or G
agactgagagagaagcctgccgatgaatgtctcgtggaattccanccgattcttcccacttncgatgggtnaanccaccgntactgattcncatttggngtnngctatnggactgaacctgctgatatcctgacatgaagcttagagtcgatctaaagaactacttctaaacaggtccacaatgcccttgncctagtaaccgtatctntcccctacctctggtcggtgctctagaagggagattgatgcattgaagaaccccaaataaaataggctttgaaaaatca

SEQ ID NO: 547 - DNA, 273 bp, Homo sapiens
  misc_feature (1)...(273): n = A,T,C or G
tatttgcacttaacagcaacctcagcttnttgccaggcggngagtaccaagagctgctgtggagtgcagatgctgacaggaagcagcagtgcagcttcaagggcaaggacccaaaggtgagactgagggatctgggcagaacactgagcagatatggctgttatgggaaggacacagtctggacatcgccagcactgggcttcagccccagccccagccccagccccagccctgtcctntatgngatcctggataaatagattcatctggtca

SEQ ID NO: 548 - DNA, 453 bp, Homo sapiens
  misc_feature (1)...(453): n = A,T,C or G
ttaccttaaagatctncctgttttgcctgccgagngtcttattannggctgctccatcacaccagggatggcaagatgccttcnagggtaatagcactgactgctcttccnaaggtgcctgagttcanatcccagcanccacatggncgctcaanaccatctttaatgagatctgatgcctgtttctggtgtgtngtgacaacagctactncgtacttatatatnacnaatggatatctctttcaagttttacctgccaaagttacacatgaaggggacactgtgggagangagtctgtctcctgcanaatgtctctaanaagcccaggtttctccttaacctangaaccctgcagctgtaggacccanaagtggggtctcttctctatactaactatcttaacccttatctcttgcccactgaatattaaataaaatatcattagttaatcc

SEQ ID NO: 549 - DNA, 308 bp, Homo sapiens
  misc_feature (1)...(308): n = A,T,C or G
gcctccaggatccagtccggctgtcgcgttgcctgatcctgttcaagttgnaggcttgggaggaactgantggtaggtcaaggcttctatcttttttccatgctaagggctgtaccactgccaaaggttangaaaagataagaggggctggcgagatggctcaacgggtaagagcacccgactgctcttccgaaggtcctgagttcaaatcccagcaaccacatgggggctcacaaccatctatnangagatctgactcnctcttctngantgtntgaagacagctacagtgtacttacatataataa

SEQ ID NO: 550 - DNA, 440 bp, Homo sapiens
  misc_feature (1)...(440): n = A,T,C or G
agactgagaaaggccaacttccatcaatgggtggatgnnncntgggactntgctncacgantgcntgggctgatagagcctnanattcaanntggctcattntaccctatggaaagaggaggtggagtgngagagccaattgnaatggaanacagngaggaaacaaaggccttcnagacacaanaggactgctgagctcacaaagactgaggcagcaccctcaggacctgcacaggtctaagcttgatgcgatctgagtactgagagggcaactggacacaattctatattgataacccagaagctttctccagttgataaactctttcaaaggaaaaacttgttttctaccatggagtgacactggatatngaaaccttcccgttaacaggcagacttccatgggctcaagacttccaatacaatatgaactcagttgc

SEQ ID NO: 551 - DNA, 207 bp, Homo sapiens
ctgagggttccaagactgccctttgggattcaaacgggagccgctttggactgactggctgccttcctcctcctccccctcctcccccttctgcttcagatttatttattatatgtaagtacactgtagcagttgtaggacacactagacgagggcaccagatctcattgtgggtggttgtgacccaccctgcgggtgctgggattt

SEQ ID NO: 552 - DNA, 318 bp, Homo sapiens
gtctcctatgctcagtcaaatctccataactgtaaatcaacactaagagcactggataagttaaggtcaaggagactctcacaaaggatccagaaggtgtagtccagattaaggtgtgttccaccacacctttaatcccggatgaccttgaactcggagatttaatcttctggaatccatagccactatgcctcaagatctccataccaagatccagatcagaatcttctatctccaagcctccagataagggtacctggtgagccttccaattctggattgtagtccattccaaataaaatcaagttgacaaccagg

SEQ ID NO: 553 - DNA, 438 bp, Homo sapiens
  misc_feature (1)...(438): n = A,T,C or G
tccagactgagaaaangagaagaaatggcagnggttgatgacaaccacccntcntccccaaaccaaaaggancaggnaggaaccccntcttccaggactcctgggacacagagtcttcaagcagcgacagtggtgggagcagcagcagcagcagcatcaacagcccagacagggccagtgggccagagagcagcctgagccacaccatccccggatcctgccccagcaccccccagccgatgcctgagcagtctggcactatgcccaagggcccttactttccacatcaaccagacccttgaangaggctcactttcataagcctacagcacccgangccggcccgccgacatgatgctccttccggcaagtttcttgccttctgtgaanggacaagcactgtgcaaaatggatatttcaacttaatgatttggtttt

SEQ ID NO: 554 - DNA, 357 bp, Homo sapiens
  misc_feature (1)...(357): n = A,T,C or G
agactgagggagatcatagacaacacaagcaaagagaacgggatcgacatcatcctggccgacaggaccttccatctcatcgcggagtcccccgaagatgccagccaatggttcagcgtgctgagtcaggtccactcgtccacagaccaggagatcagagaaatgcatgatgagcaggcaaacccccagaatgctgtgaggtgctggagagatggctcagcagttaagagcactgactgctcttccgaaggtcctgagttcaaattccagcaaccacatggtggctcacaaccatccgtaacaagatctgatgacnccctcttntggagtatgcttacagctacagggtacttacat

SEQ ID NO: 555 - DNA, 100 bp, Homo sapiens
  misc_feature (1)...(100): n = A,T,C or G
gagcacggcagtggtgacccaacagctggtgtctaagcccagccgggagaccccgagggccanggccctgtcgtgttagcaccgcagatcggaaaaaaaa

SEQ ID NO: 556 - DNA, 361 bp, Homo sapiens
agactgagggagaagagatgggtgactgtgggtgatacctccctgaggatattcaaatgggtgcctgtgacagatagcaaggagtgtaccatattcatgcctggtgcccaggaaggtcagaagagggcttcagatccctcagaactggagtcctggatggctgagtcaccatcgaggtactggaaatcaaatccagatcctctgaaagagcagcagacactccttagctgcagaaccatctctccagctcctccacagtttaaaaatattatgtatttttatcttatgttcatgtgtgttttgcctgcagaggccaaaaatacatatctgttctcgtggaactcgaattacaaaaaaaaaa

SEQ ID NO: 557 - DNA, 241 bp, Homo sapiens
cgaagaaatgctgtacgtgcccttaaatcactctctaagaaataccgcttagaagtgggaatccaagctatggaacatcttatccatgttttacaaacagatcggtcctgagttcaaatcccagcaaccacatggtggctcataaccatccgtaacgaaatctgatgccctcttctggaatgtctgaagacagctacagtgtaattatatatagtaaataaataaatatttttaaaaaatg

SEQ ID NO: 558 - DNA, 262 bp, Homo sapiens
  misc_feature (1)...(262): n = A,T,C or G
cttttccctggtcccangacttncccacccctcctccaaataccaagactatgggcttaaaantttcaaatgggngctggagagatggntcatcnagttaagagcaccgactgctctttctaaggtcctgagttcaaatnccancanccatatngnggctcacaaccatctgtaatgnaanctgatgccctcttctgntgtgtctgaagacagctacagtgtactcacatatattaaataaataattctttaaaaaaaaaaa

SEQ ID NO: 559 - DNA, 224 bp, Homo sapiens
  misc_feature (1)...(224): n = A,T,C or G
tgaggtccgcatagccgctaaattcatcacccatgcacccccaggggagtttaatgaagtattcaatgttccaaccctgggacagccctgaggtgctgaacaagggagattgctgcaagctccattacaacctggacgaaaggntgtctcaaaactnaaatgaantgaatagaacccggncgggggcggtgcacccctttattcccaccacttgggaggcacag

SEQ ID NO: 560 - DNA, 402 bp, Homo sapiens
  misc_feature (1)...(402): n = A,T,C or G
ctgaaggcagtttacattcggagttccgcggactcttcanaggctgtaaaaatgccggagtcacgaaagcctgcaaagagctgttgcttgccttgctgctgctgctgctactgccgtccctgcccgtgctgcagctgctactcctgctgctgctgctgctgcttgttgctgattgttgcggttgctggttgctgtttactgtttgctgccggctggattgctggattgctgattgccagtcggcgaaatcctggcgatgaagatccaacttgccccaagaaacaagacgaccctaagaagtagtctaatgatttcaatacgccctttccccctctgaccntttttctcttaccttatgctgggggattggaagggtggcagaaaaaagaacccaataaagta

SEQ ID NO: 561 - DNA, 413 bp, Homo sapiens
actgaggggagtacagttctccaacactgccccagctaaatcatctaatgccacaggtgacaaggggcaagaccacctctcctgttctcatgacctagggccggctctcccacctgacagaggcagcaaaaacgtaggtggtgggagggcacctctccctcactcatgctaccacgtggcagacaagggacatgcagacaagggtcatgtgctcatgacctctgtcaggatcacccaagtctccaccatcagtgccaactctactgtgctgctcagatcagtttcttcctctgaagatgcgctgtcttttgcagatttcattgattttttctttatacctggttcagcaaaacaacataggaaggttaaaagacaggctcaacagtgaaaatttggtatactttgaacccata

SEQ ID NO: 562 - DNA, 420 bp, Homo sapiens
  misc_feature (1)...(420): n = A,T,C or G
acctgcttgctcggggtggagctncctgctcatncatnctaccacgcccactggnggaacntgaggagccacanacgtgcnccnttctactggancaatanantattatggtgggaatngggtcccctnccccttccttcataactanccgnnanagcaataaaanttgagccttgatcatnangantgaaaaaagaaggggggggggnannancccaacatggacacaggaatcttcttgatagttcagtcaagttctctcttctttatttccccccaacccccagcttatgttcctcagcaaactctcaattacagnggggctatattctatttttctttaagggnnatggataccatnnantttcctaannacccttnanggggataaaagggntttacatattacagggggaaaaa

SEQ ID NO: 563 - DNA, 376 bp, Homo sapiens
agactgaggataattgaaataaatcaaaaccaaaagcaggtggaacaggatattaaagttgccatcttcacattgatggtggagataaacaaaaaagggaaagctctgctgcaccagcttgagagtcttgcaaaggaccatcgaatgaaactcatgcaacaacagcaggaagtggctgggctttctaagcagttagagcacgtcatgcatttttctaaatgggctgtttccagtggcagcagcacagccttgctgtacagcaagcggctgctcctgcttcctgacctgcttgagttccagtcctgacttcctttggtgatgaacagaatcgtggaagtgtaagctgaataaaccctttcctccccaaaaaaaaaaa

SEQ ID NO: 564 - DNA, 248 bp, Homo sapiens
ttgacacccttagtctgcaaaccaaactcagggccttctgtatgtggagcatttgttgtaccgctgcctgaggacgaggaaggggaagttactgggctggcttcgagagatatgtatgtatgcctgatgcctgtggagttccaaaggtgtgtcccctgggattggagttacaggcagttgtgagccatttgggttctgggatgctaacccaggttctctgcaagagcaacgagtgcttcaaccactga

SEQ ID NO: 565 - DNA, 100 bp, Homo sapiens
  misc_feature (1)...(100): n = A,T,C or G
ctcatagtaaaaagaagcgatccgggtcncgcagncgncattcnaagtatctcacctgtcaggcttccattgaattccagcctgggagctgaactcagta

SEQ ID NO: 566 - DNA, 249 bp, Homo sapiens
actgaggattttggctttagagaagcttggtgctgtcttcaatcaagtagccttcccattgcagtacacacccaggaagtttgtcatccaccctgagagtaacaaccttatcatcattgagacggatcacaatgcctacactgaggccacaaaagctcagagaaagcagcagatggctgaggattgtaaggaattgggctgccgactgtaagtcatcaataaattcctttactatctagaaaaaaaaaa

SEQ ID NO: 567 - DNA, 260 bp, Homo sapiens
  misc_feature (1)...(260): n = A,T,C or G
cctgagactgcaagtggcaatgtggaagcaaaagtcgtctgcttttacagaagacgggacatctccaacacgcttatcatgctcgccgacaagcatgctatcttncactannagcctttggangaanacataaaactcncanntcctnntgcgccntgcctgcctggatactgccatgctctcacctggatgataatggactgaacctctgaacctgtaagccagacccaattaaatgttgttttttataagaaaaaaaa

SEQ ID NO: 568 - DNA, 442 bp, Homo sapiens
  misc_feature (1)...(442): n = A,T,C or G
gatgaggtaggcacggctggccantcctgggtgcaccccaaaatacagtttgctttaattgaacaatcactcaaaaactggcncaaggaanananntgatngnngnnccnganctgcgggtcgcggtaataaaggttcccgtaaagnngactgttaagaaggattcaactgtatgaattcagaacttttcagctggggaacgagagtaccagtgagtacagctttacgaggtaagtccgatcttgaactttctaacgaaattcaagacagtctatcagaagtaaagtggaaaatggctttacaagttatgtttggccttgaattttttctagtgttagaancccttttgttccttttcacatgttatcaagtggttaaagcagggcggattctaaaggaaattcannacaagctntcanaagtaaaacggggagaaagagtt

SEQ ID NO: 569 - DNA, 197 bp, Homo sapiens
gactgggatgtcctaacttcaggatggaaggaaggaaacatgatgccatattgaagaggttttgtctttgtttcaatgggagaagaagagctacggataccatcaaattaataaagattagatttggccaggggagacctcctgaaaatcttggctacagacatgaaggaaaaaattcaagaagaccaaaaaaaaaa

SEQ ID NO: 570 - DNA, 301 bp, Homo sapiens
  misc_feature (1)...(301): n = A,T,C or G
gactgagggagaaactcactcgccaaacaacgtctcgtggtatcctggctgactctggccgcttcagcagagcctggctgttcctgctggattgtgctactgctacagattcatgtttggtgtttgctattgaactgggctgcttatatcctgacacggaagagtggaatcgcccaaagcaagtacttctaatcaggtccacaactccctttgcctttaaccttgctttttccctacctctggttggtgggctaaaagggagggttaagaaccccaaataaagncagttttgaaaaaccta

SEQ ID NO: 571 - DNA, 267 bp, Homo sapiens
  misc_feature (1)...(267): n = A,T,C or G
atgacttggataaagaactaaacaactacattatgcggtgtagggaatggtactgaaaagaaagcaaaaaaagccaagactaaaattaaagctgaagtataggaggagatggaggaggaggaggcggaggaagaacaggtagtagaagaggagccgactgtaaagaataaaaagaagaaggataaaaagaaacacataaaggaagagccactttccgaggaggagccatgtnccagcacagcagttcctagtccagagaaaaaaaaa

SEQ ID NO: 572 - DNA, 370 bp, Homo sapiens
agctgtagctgtccctccaaacaaggctattcagagagttggagacaacagaaaaggcaagctagacacgttcagcatgagtctaggactgggctccgtaatttcctgtgcgtcttcagaacaatctggcaaccacacagtttgtaaactgtacacctgaacttccaaactttacatattatacatacatacccatacatatggatagatacacgtatatgtatatatgtatattgtgtatatgtatataaatatatatgtgtatatacatatatttataaaatgttaagacatatctgatttactttcaccactacagaattatgtatattactggaaaaatttagaaatacttgcttcttaatagaat

SEQ ID NO: 573 - DNA, 256 bp, Homo sapiens
  misc_feature (1)...(256): n = A,T,C or G
acactgagagaccctgttgactgactgagctggcttggccacccacccttgaaccaacgatcatcctgtcttggtttcccaagtgctgggattacagatncccngngactngcatgacacccctgtnctcttntctcggagacccngtgacttgcctgncccacagaacacactnagcgaaaanctgctgnctgaataancctnctgcccccgtgcgtctcctnctccgtagncgtnactgacggactgtggtgac

SEQ ID NO: 574 - DNA, 544 bp, Homo sapiens
  misc_feature (1)...(544): n = A,T,C or G
ctgagccccctgggatgatacccaacaactcatgagaataatcttcatgaccgaagagtgagagaggataatgcaggaagccaaaaagaatgtcccttcagacacgagggcatcatcgattgaccaggctgttatctacagcgggtgtctcctgattagacctggctgggactttaacacagcagaaggtaagtggcacctgaaggtctaccgccaggctccattggcaggtctcaaggagggctgtactacaacccacaaatttgaccaaggtacgtgaagttagacaaggatcagatgagtcacctgctgcctttctagaatgactcatggaggcattccgtcagtatacaccctatgatcccagcagcaaggagcacaaagctactgngactatggcatttattagaccagcttgttagagatatcaggaaaatgcttcagaggctanagggatgacagggtaagtcactgaggggtttaatgcaggttgcttgaggaagtctaccataacagggagacagggggagaaaaaaccatattg

SEQ ID NO: 575 - DNA, 525 bp, Homo sapiens
  misc_feature (1)...(525): n = A,T,C or G
gcaactgaaggaaaagctgccctatgtggtaatgaaaaacttaacactgtcctgcatgactgcctatggaagaccgatgacctctgccctcaagcccaatggagaatcctaggggcgctagctccatccatctgtaagtcccagaacccaagtctcaggagcggcgggagaccggagacaaagtgagagaggtggatggaagcgaaagacaagcaggagagagagaagagaccacgctgactctcactccctcttctttaatacaacaaagttgcaacttgggctcctggatctaaataccgcaggtccagagaagacaaaacaccaggcatcactgcatctcttagggggtacccaccaagacctccaggtccttcactccaggaagggccctgttgaatatctgcagagagatgggttggagcacagcttggtgctcagtcctggccctgtggctcctctggtgtgctgtctgctccaacgcaacgtcagggggacngcaatgcgtttcctttttgacatcca

SEQ ID NO: 576 - DNA, 352 bp, Homo sapiens
  misc_feature (1)...(352): n = A,T,C or G
agaactgagggttccaagactgccctttggtattcaaacgggagccgctttggactgactggctgccttcctcctcctccccctcctcccccttctgcttcagatttatttattatatgtaagtacactgtagcagttgtaggacacactanacgagggcaccagatctcattgtgggtggttgtgaaccacccaccatgtggttgctgggatttgaactcaggatcttgcagaagagcantcagggctctaaaccgctgagccatctntccagnctcctgcattccttcttanggcatgaatgatcccagcatgggacgacagtctgccctcccttctttttgagggagat

SEQ ID NO: 577 - DNA, 433 bp, Homo sapiens
  misc_feature (1)...(433): n = A,T,C or G
actgagcataaacagaggcggcatgacaagaaacnnaggctctggaggttttggtggtggtggcaccaggagagggacacgtggaggcagccggggaagaggtagaggcaccggcaggaactcaaagcagcagctttctgcagaggagttggacgcacagctggatgcttacaatgcaaggatggacaccagctaaacaactgagcaaatccacacaagtaacaggacccagaagcctcgcctgtgatgcctagagggagggttggcaactgaactgtgcagacaatggnggatttggtttggttctttttatttcttttctttttttttttnttcccggtttaaaaaaggatntaaaaacncttntaaaggnttttttttttttttttttggggttggggngggnttttggttttttttttaaaaaaaaaaa

SEQ ID NO: 578 - DNA, 100 bp, Homo sapiens
ctgatacatctttagatggtggaagatttctctgagaagtgagtatcggtcagcaaaacctggagaaacaaaggaaagccatgaacacttgctagataac

SEQ ID NO: 579 - DNA, 372 bp, Homo sapiens
  misc_feature (1)...(372): n = A,T,C or G
gtgacaggaggccatantgactganttgtgganctctcacaggtgctgcaggaggcntgnntggtgccntactgnnnaaactgnanaanggngnnggatgatcatctcactgacaatttagagacagagaaactgtgtgactacttctccacacacctgggtgtctaccggcccgtgctggctgcgctggagtctctgaaccgtgcggtgctcactgccatggacactacaaagctgggaggagatgnagtctcccctnccccancctgaaacctgcttgctcngggnggagctncctgctcattcgttctgccncgcccactgttgtancctgnngaatcacacncgtgcacctttctactggaccagaaa

SEQ ID NO: 580 - DNA, 203 bp, Homo sapiens
  misc_feature (1)...(203): n = A,T,C or G
agaactgagggttccaagactgccctttgggattcaaacgggagccgctttggactgactggctgccttcctcctcctccccctcctcccccttctgcttcagatttatttattatatgtaagtacactgtagcagttgtaggacacactagacgagggcaccagatctcattgtgggtggttgngaaccacccactcatgtg

SEQ ID NO: 581 - DNA, 100 bp, Homo sapiens
  misc_feature (1)...(100): n = A,T,C or G
cactgagaccaacttttacaagtctacctgttcgagaagaaatgatggcgaaatactcaaacctttccttaaagagctgtnatatctcagtgacggaaaa

SEQ ID NO: 582 - DNA, 430 bp, Homo sapiens
agactgagtatccctggaactgatgatgtcatccagccagctgctcctgttgacccgggacacccacccttagctgactcgtcccaccatggtgacgctgtcagctcagtctctacacatctgacagtccagagcgcctccccatctgctgcccgtgcaagtcctgctcctttggccccagaacatacagcctcggctccctccgcagccggtcctggagtagaagtcacccccactgcctcccgagtgctgggattgaaggtgtgtaccaccacacccggcgagtctccctttcttaaccccatgaggataatccttcgccaccatgatgtgctctcctaagtcattttgggcactgttagctacgcacgcacgtcctcttttcatagacaaagaaactgagaacaaacaaggtacaaaacaacaaaaa

SEQ ID NO: 583 - DNA, 377 bp, Homo sapiens
  misc_feature (1)...(377): n = A,T,C or G
cactgagaggctcacaggacacctgcacaacaaaggctgtccccgtatgtaatcaacctggacccagctgtgcatgaagtcccctttcccgccaatattgatatccgagacacagtgaaatataaagaagtcatgaagcagtatccttttnctcatctgctgcgagactgactcggtcatggcaaactgctgnctttaattgntttgggggagnggctttgcctgtcangnngngacaatacaagnagaaaactcatgnccttttaggnaatnntattaagaggataagatgagggctggtganatggctcaacaggtnagaacactgactgctcttccaaaggtcctgagttcaaatcccagcaaccacatggtgg

SEQ ID NO: 584 - DNA, 495 bp, Homo sapiens
  misc_feature (1)...(495): n = A,T,C or G
cactgaggccaagttcacagtggagactgaccccacatgtgagtttattttgcctcaccagttcaggtcacagttcacggtggccccatggtgtccacagtcaggaagcaaagagagatggatgcttgtgctcaacccaacctctcctttttatccagccttggatcacagcccacttcatgatggagcaacactgggtcatcacccaagtgccnnggcacatgcagccacccagttttggactttcagcttctaggactgtatcccatgtaagcctctttataaattatccagcctcaagtgctctgttatagcaacagtaaccaactaagaccccataactccagcaactaatacttaatgaataattgctgacttaatctctcatcacttggattctataaaggtctttggcaatcatttcttatnggaanaaatattnttnttcccaatttgggcccccncctactttggggnaagggggggttagaaggt

SEQ ID NO: 585 - DNA, 230 bp, Homo sapiens
  misc_feature (1)...(230): n = A,T,C or G
gaaactcctgcctatttntgtgtctttgctcctgctccttaccccttatttgtaaggcccanccttgaagaattgcttgagggctggagagatggctcagtggttaagagtactgactgcacttccagaggtcctgcaaccacgtggtggctcacaaccatctgtaatgggatccgaagcctcctggtgtgtctgaagagactgacagtaaaactcacataaaataaata

SEQ ID NO: 586 - DNA, 295 bp, Homo sapiens
  misc_feature (1)...(295): n = A,T,C or G
gactgagagaaaaaagcagagatcgtgaaagggaacgggagcgggaaagagagagagaacgagaacgggaacgagaacgagagcgagagagagaacgggagagagaacgggaacgggaaagagagaaagacaagaaaagagacagagaagaggatgaagaagatgcntntgaacgaagaaaactcgaacgaaaactgcgagagaaagaggctgcttatcaagagcgccttaagaattgggaaatcagagaacgaaagaaaactagggantntgagaaggaggcagaaaaaaaaaa

SEQ ID NO: 587 - DNA, 229 bp, Homo sapiens
  misc_feature (1)...(229): n = A,T,C or G
aattgaggcttccaagactgccctttggtattcaaacgggagccgntttggactgactggctgccttcctcctcctccccctcctcccccttctgcttcagatttatttattatatgtaagtacactgtagcagttgtaggacacactanacgagggcaccagatctcattgtgggtggttgggaaccacccaccatgtggttgctgggatttgaactcaggatcttca

SEQ ID NO: 588 - DNA, 127 bp, Homo sapiens
  misc_feature (1)...(127): n = A,T,C or G
gaaattcaatagcagtacagcatttgccttgcatgtgtcagncccttgtttcaaactctggtaccagagtttagatctggttttgataaataaataaataaataaataancaacaaaatataaaaaa

SEQ ID NO: 589 - DNA, 100 bp, Homo sapiens
gtccacttcttcaacagctttttccatagacagctggtaaccaaaggctataatggagttaaaagatggacgaagaaggaaatctggaaaaagaagaaaa

SEQ ID NO: 590 - DNA, 195 bp, Homo sapiens
  misc_feature (1)...(195): n = A,T,C or G
ttaggaaaaaggtcacaggaactgaaggggatgaaaggagctaccccacatgaacaccaacagcagtgncnactngcctggacccctgaatactcccagaancaacacccaaagaacatacatggacttattcaaggcctgtggcacatatctagcaaanaacttgantntccccagtgggagaggatgtgccca

SEQ ID NO: 591 - DNA, 316 bp, Homo sapiens
  misc_feature (1)...(316): n = A,T,C or G
ccaactgaggtcttgccccctgctactctcccaaaactactgaactggactgctggtatcatccatggagtgtttgtgagtggactgagctgctgctgctgacctgtgaactgaactgctgatttctaacaatgcagataggatttgctccaaaaaaccaatttctaaacaggtacacttcctccatatcctttcttttccactacctctggtgggtggttggctagaagggaggttaaagcctttactaaaaagagggttgagaaaaaaattaaagcctacanccttttattaaataaacttttgtaatgggtaa

SEQ ID NO: 592 - DNA, 227 bp, Homo sapiens
gaggactctcctgttcttgccacatttgactgaagaaggacaacggggtcaaggtttgaggactgacaggtaagttttcctggagattcaaaactgtgcttttcaacaagcattggggctcaaagttctgtcagtttgagggcagcctagtctacaaagcgagttccaggactgccagtggtctgttacacagagaaacctgtcttggaaaaccaaaccaaaaaaaa

SEQ ID NO: 593 - DNA, 182 bp, Homo sapiens
  misc_feature (1)...(182): n = A,T,C or G
attcttgagtttcttggggccangaagatgacacgantagatctagacnctggcctagcgtgacctccanagtttggnccttgcntaaaggagaaaattaatnccttcagttgntctctgacctccacatgcgtcctgtaacatgggtgtatgcatacacataaacacacatccacacgttg

SEQ ID NO: 594 - DNA, 140 bp, Homo sapiens
  misc_feature (1)...(140): n = A,T,C or G
gaagaattttcatcaacaaacatcattttnaaagaaattnanggcgaaaatggggcattgggnnnccntgggggaagggggagactganagaatgagaatgaatnatggccaaataaataaataaataaataaataaaaa

SEQ ID NO: 595 - DNA, 204 bp, Homo sapiens
  misc_feature (1)...(204): n = A,T,C or G
attatatacaggagtgcntaaattttgtctgttacagccncggccattagaagctggggcaaagcttttctgcctacttaactctgattttatntatnngttatatgtaagtacactgtagctgncttcagacactccagaagagggagtcagatctcattacaagatggttgngagccaccatgtggttgctgggatttgaac

SEQ ID NO: 596 - DNA, 235 bp, Homo sapiens
  misc_feature (1)...(235): n = A,T,C or G
actgaggcagggcgtgagtactcgcctgctgccaccactgcggaaaatgggggtggcnagaagaaacagaaagagaaggagctcgatgagctgaanaaggaggttgccatggatgaccacaagctgtccttggatgagctgggctggcaaggaaaggttggggtgtgctggctgaaggagagaaaggagagaaaggagagaaaggaaagaaggaaggagagaaagaaagaaagaa

SEQ ID NO: 597 - DNA, 141 bp, Homo sapiens
  misc_feature (1)...(141): n = A,T,C or G
gttgtggaggaggcagagaatggaacgagatgcacctgccaatgggaacgctcaaaatgaggaaantggggagcaggaggctgacaatgaggtagatgaagaagaggaagaaggtggggaggaagaggaggaggaggaata

SEQ ID NO: 598 - DNA, 104 bp, Homo sapiens
tgaggaaagaccgggaacgagatcgggatagagaggaccgatctaaagatcgtgaccgagaacgtgatagaggagacagagaacgggagagggaaaaaaaaaaa

SEQ ID NO: 599 - DNA, 740 bp, Homo sapiens
  misc_feature (1)...(740): n = A,T,C or G
caggcttgaccaagaacctgaagcctggtnaggatgacttggannntgacctgnaactggatcccatgctgncttttgaacagagcaggnggatggaccttaatntggacctagacttggacttggaccagncanagctggaccctggatctgagctggattctgagatccaagccaaacctgagctggaactagagtcggagcttgagacagatgcccagacagagccagagacagaggaagagccagagctggagccagagccagagccagagccagagacagagccagagccagagccagagagagagaggaagaccaggacaaggtctcagagcccctggcggaactacttcactgcttatcgctttggttcttcaaactcccagtctagagctccacctcagacacgcccagaaaagagaaagccacataattaccccaattctccctaaaacaataaggatccttggtaggtgactgcaaaatgcaggctgagtatcttggcaaatcccttctgccctacttggcatgacatctagactgggtacaaagccaccggtcctggctctgtgaccccttcattgctgacttncttcttattggattcttgggatcacatgcccatcatatgcccangctatgtgacttcaaggntggcaantggcttttggggtctggcttcaggctttgcanaatgnatttttaacagatttcagtgaaggcttcctggacgtact

SEQ ID NO: 600 - DNA, 291 bp, Homo sapiens
ggttccctaaaatcagactctgtcatcggcaagtggagactgtaacacgactgggaccctcacatgccgataagcagtcaagaatattttctgggagctggagagatgggctcagcagttaagaacactgactgctcttccggaggtcctgtgttcaaatcccagcaaccacagggtaactcacaaccatctgtaatgagatctgatgccctcttcgggtgtgtctgaagacagctacagtgtccttacatataataaataaataaatctttttttttaaagaataaaaaa

SEQ ID NO: 601 - DNA, 306 bp, Homo sapiens
agggagaaactcactcgccaaacaacgtctcgtggtatcctggctgactctggccgcttcagcagagcctggctgttcctgctggattgtgctactgctacagattcatgtttggtgtttgctattgaactgggctgcttatatcctgacacggaagagtggaatcgcccaaagcaagtacttctaatcaggtccacaactccctttgcctttaaccttgctttttccctacctctggttggtgggctaaaagggagggttaagaaccccaaataaagtcagttttgaaaaacctaaaaaaaaaaa

SEQ ID NO: 602 - DNA, 600 bp, Homo sapiens
  misc_feature (1)...(600): n = A,T,C or G
acaatctggagcaaaagatcctgcaggtgttgagcgatgacggcggccctgtgaagattggccagctggtgaagaaatgccaagtgcccaagaaaaccctcaatcaagtcctttaccgcctgaagaaggaggacagagtgtcctccccagagcctgcaacatggagcataggcggggctgcttctggagatggggctcctgcaatccctgagaactccagtgcccagcctagccttgatgaaagaatattaagattcctggaagccaatgggcctcacagggccctgcacatcgccaaggctctgggaatgacgacagccaaagaagtgaacccactcctgtattccatgagaaataagcaccttctgagctatgacggacagacgtggaagatctaccactcacgtcaggaaggccaagacatagtcttgccatgtagccctggatgtcctagaactcaccatgtagaccaagctggtcttgaacccacagagatcttcttgcttctgcctattaaattctgggattaaagcaccactacacctggaaaaatatcttttaaagncngtaaaataaatgaacaattaaagaatgcattct

SEQ ID NO: 603 - DNA, 266 bp, Homo sapiens
  misc_feature (1)...(266): n = A,T,C or G
gtggaactagactcttggacttcccatttacagctgtccattgttgggactagcggctcattcagcaccatggagagtgccaccatcagccctcagcccccacagtctgactccctggaggcctttccccagaagagcatggagcctgcagacatcgctgtcctagttctgtacttcctctttgttctgcttgttggattatggccacagtgaggaccaaacgaagacacagtgaaaggntacnttctggcttggaagggacatgg

SEQ ID NO: 604 - DNA, 459 bp, Homo sapiens
  misc_feature (1)...(459): n = A,T,C or G
atctcagcggttctatagcacgctccagatgtcaaattaaacctcggtgtaagcggagatttcatcaaagaatctacagctactacatttctgagacaaagaggctatggctggcttttagaagttgaagatgaggatcctgaagataacaagccacttttgtatgtgaaagancatgtaatttgngtnttaagacctaatntgnaggatgcttatgtnnnttttanagacagatgaagaaaatgtnagcctttntggngaaaaatantanagatgaaatcganaaaacttttggtgaaaaacagagatggctcancagntaagagngcttcctgctgtttgagagagcttgngtttggtccagcactgtatcaggcaatgcagctgcctatagctccacatctgacttngtacacttatagaaacacatacacaaataaatcttttttaaaagtaaaa

SEQ ID NO: 605 - DNA, 277 bp, Homo sapiens
  misc_feature (1)...(277): n = A,T,C or G
gagtgatcgaagaggagccatgatggntaaacttctttaaaagaaagaacgacaaactggctttccttgatgcctttgaacctgagtccagaagacttagggacaatggatagctaaaatttatttatatctgaagttgggtggcagggtgcactccagaggcagaggcagaggcagggggatctatctccgagtctgaggtcagcctggtctacagatcgagttccaagacagccagggctacaaagaaaaatcctgcctcaaaaaatggaaaaaa

SEQ ID NO: 606 - DNA, 346 bp, Homo sapiens
  misc_feature (1)...(346): n = A,T,C or G
aactgaggaaggtgacanatctctggaaanggngctacatatgattcnangacaccatgnggatgctggnnatgaaantggggccctctggaanaacannggaagaacggccaatgctcttagcagacgaagcctctccagcctncccttcacaacccctagtgttatcaagagactagcaaaccttcanggggtcttcaactaaataatacaatgagttttgcctttaaagagcacactgctgggctggtgagatggctcagtgggtaagagcaccggactgttcttccgaaggtttgaagttcaaatcccancanccacatggnggctcacccccccccccccc

SEQ ID NO: 607 - DNA, 282 bp, Homo sapiens
  misc_feature (1)...(282): n = A,T,C or G
ccactgagcttaaacacaactgaagtctgtctgtctcaagtgtattaatgacgcctgcccaangtggtgggaaagtccgtgaaactgcaatcgggggctggtgtgatggctcagtggttaanagcaccgactgctcttctgaaggtcctgagttcaaatcccagcaaccgcatggtggctcacatccatccgtaacaaaatctgatgccctcttctggagtgtctgaagacagctacagtgtacttacatataataaataaataaatctttaaaaaaaaaaa

SEQ ID NO: 608 - DNA, 100 bp, Homo sapiens
  misc_feature (1)...(100): n = A,T,C or G
gatcactagacgggagatgctgccaagngccccagacgggatcaagactgcaatgacaaccataagatnccctaaagctaggacactgcaaaaaaaaaaa

SEQ ID NO: 609 - DNA, 398 bp, Homo sapiens
  misc_feature (1)...(398): n = A,T,C or G
ggtcctctgaacaatctacaagaacaactacagcngacacctcagcgcaggaaaaccntaatngntnnnnccagcctttcaaaaccaaaatntttaggttttaccttttagcatggtacattactgngaaaacataacggaatgcagaagaatacagcttttagcttactttggtgaaaaaggattcaaccctgatttttgtaagaaatacccagatgtttcttgtgacaattgctgtaaaacaaaaggnaattacttaagtggngatgcaggcctttaatcccagcacttagaaggcagangaaggtggatctctgaaatcaaggccagnctggtctacacagagagttccaagacagccaaggctacattatgaaacccaatctcaaaaaaaaaaa

SEQ ID NO: 610 - DNA, 457 bp, Homo sapiens
  misc_feature (1)...(457): n = A,T,C or G
agctgctggtgcttgtgctgttcccaagccaaagggaaggagagtgcnaggaagaactagtggtggagtcccggtatctgcaatatgacaagaaagcnaanaagggtccccctggcctntganaaagaacatcaaagatggcttaacctctgtagtggctattcctgggtgtcaacttgactatatttgggaatgaactacaatccagaattggaaggctcaccantgaccctaatctggaggctgggagatagaagtntctaanctggatcttggtatggagatcttgaggcatagtggctatggattccagaanattaagacagggagatctccgagttcaaggtcatctgggattaaaggnatggnggcacataatctgggctacaccttctgctggagaccatataaggacattggaagaagggagnctcactctcgctcctttgcctgcttg

SEQ ID NO: 611 - DNA, 445 bp, Homo sapiens
  misc_feature (1)...(445): n = A,T,C or G
actgagattgggacaaaacacccatgggaaggagttacagaggcaaagtttggagctgagacaaaaggatggaccatctagagactgccatatccaaagaaattaaagatctcagaagatgcctctcacagaagccagttgtcatcctctgaactgctctaatgaaaagcaaggaccaaaggatggctgagggccaacagccacggagaaaatcaatcctgtcattgcgagtgggtctggacgcaccctcttctttccagtggagccagaggtggcaccagcttgggctaagcctttgaatgtggacttgcaaggactcagccaagttgtgtctagattaccggccaaaagacacctgtaagagttaagttgggngttggtagttgctcacttttggagnaatttattactanttcatagataaccaataaagagtcttttatcg

SEQ ID NO: 612 - DNA, 169 bp, Homo sapiens
  misc_feature (1)...(169): n = A,T,C or G
tgcggccataattgttcctattgccaaaccaagttctgtgctcgatgtggaggncgagtgtccttacnctcaaacaagctattgtctattggcatctttattcaccattcanaattaacttgggnatgggtcccaaaagctatgancctattccaaaacttgaaggcca

SEQ ID NO: 613 - DNA, 459 bp, Homo sapiens
  misc_feature (1)...(459): n = A,T,C or G
tgaggtgatccctgactaacagcgtcntcaatgcntctgtcgcattcaagacatctgnggggtttctgntctttttaagttttaacccnctggnaggatganggtttcgtcacacctgcaaacccgngccgntcacggtttctcaccggagtggcttgnttctagctctggatctgtgactcatgcagaaacccaaatggaatcatcttgcantagttgaaagtgcttcctctgaagataccaggttttcattgaggnggaagcaaggnacctgactctcaaggnnacanngtgacccatttagaggcntatgnntaatgtataccgnnaatgctatnangcctgtcgagatggcncancaatnaagagcactgactgctcttccagangtcctgagttnaattnccagnaaccacatagtggctcacaaccatctacaatgtgatctgatgccctctt

SEQ ID NO: 614 - DNA, 225 bp, Homo sapiens
  misc_feature (1)...(225): n = A,T,C or G
ccgcccaccatgggagccctggctgtnttggagctcacagaaaaaccgccaactntgncgacccctacttaactctggttaaaggtgtgcaccaccatgcccggctntncacaganaatnnttattcttagcatggtaggctcttccttctggatcattttattcattntactacacagnanagnttttactaaaagactttttnccccatttaagaaaaaaaaa

SEQ ID NO: 615 - DNA, 385 bp, Homo sapiens
  misc_feature (1)...(385): n = A,T,C or G
actctcaaagagaaaaaggctgtgctcaccaacntcctgntgcgcctgcngtcatccangggaggtagacaagagaacctggagctttggggttaaattcttttactgaggagggattaaaagcacaacaggggtggggggtggnatggggaaagnnnctcaaggatgctgttcancatgagccngacctggatgtcnctcatgatttgcgannttaanttactgcnntgacantnctcacattgtgtcctctaanaaccggttaagccnttgtananagancagcacagctggccatcagagtcaccaatcccaacgccaggctacgcancgaagaaaatgagtagatggcttgtgtgcatgtttttatgtttaaataaaaatg

SEQ ID NO: 616 - DNA, 430 bp, Homo sapiens
  misc_feature (1)...(430): n = A,T,C or G
gagcctagcatggctgtcttctgagaggtctaccagcagctgactgagacagatgcacataattacggtacagataattggactaaggtcaaggacccctattgaagagttaggaaaaaggtcaaaggaactgaaggggatgaaaggagctaccccacatgaagaccaacagcagtgtcaactaacctggacccctgaatactcccagaaacaacanggnnngaacatacatggacttattcaaggcctgtggcacatatctagcagagaacttgagtatccccagtgggagaggatgtgcccagttctgtagagactatataccaggtagatacctggggaggtcaccctctcagaggtaaaatggagggaagacagagtggggaattctgggagggggtaatgggagatggggcaatatttgggatga

SEQ ID NO: 617 - DNA, 351 bp, Homo sapiens
gactgagcgttgttgcagccagcacatggaagcaactcaggcgctcaggaggctgagaggaggaagcagcgtggaggtggctgaggatggagctcggtcggtcggatgcttgcttcacagacacaaaacaacccagggctgcagagatggcccagtctttaagaacatttctgttcttcccaaggacctgagtttggtgccagaatccacagctggtggtccgtaatagcctgtaacttcaacttcctgtcactccagctccaggggatccaatgccctttcctggccttcctgagcacctgcatacacatcacagacagacagacagacatataaataaaagtaaaaaaa

SEQ ID NO: 618 - DNA, 265 bp, Homo sapiens
aagaaagtctcgccaacagatggaatgaaatggaagagaaaatgtcaagtcttgaagacaaagtagaaaaatggatcgatcatccaaagactatgtgaactataaattaaaaatctaggcattcagggaatctgggacagtatgaagagaccaaatctatgaataattgatatagaggaaggagaagaaactcaagtgaaagccacagaaaatatcttttaacaaaaatcatagaataaaaaatttcaaatctaaagaaaaaaaa

SEQ ID NO: 619 - DNA, 147 bp, Homo sapiens
  misc_feature (1)...(147): n = A,T,C or G
agactgaggaggaattttctcagcaaacatcatttaaaaggaaattaatggcgaaaatggggcattgggaaaccatgggggaggggggagactgagagaatgagaatgaataatggcaaantaaataaataaataaataaataaaaa

SEQ ID NO: 620 - DNA, 498 bp, Homo sapiens
  misc_feature (1)...(498): n = A,T,C or G
gactgagaatggcctacctgctcctgtccggctggcgaatcttaccacntctgnntcttctcccagagacctcccccantcagatcagaagtcccaccttccntttgctgcccagctaccagacattaaatccttattangncagaagcataancagnacnnatagncncantncaccctcatactcagcnntnngctggaacagaantaacaantgaataacacaatnggcnaccttcaagtagtgcnccccaacacacatgacaagggtgctttgagtaggtttggcctccatagattcatgtattncagtgcttggccataggaatggcactagtaggaggtatggtcttattgaagaaggggtagctttgttgaaggaagtgtctcactgtggggatcagctttgaagactcttatgctcaagcaatgcagaagacagtcccctagctgccgtcagatcaagatgtagaactcttagctcctccagcaccatgt

SEQ ID NO: 621 - DNA, 389 bp, Homo sapiens
  misc_feature (1)...(389): n = A,T,C or G
tgtgggtctccacggcacanggctgagtggngctggacngggnggngtgctnagtccatgtcaggacacacaggacactggtgcagcttcattctagactgaatcaccaaagagcaagcacngggctggacctaggccccctgcatatatatagcatgatgagccacttgatcttcatgcaggtctcccaaacaactggaggnggggctgtccctgagtctgttgcctgcttgtggatgctgcgcccctaaatggacagncttgtctggcctgggtgggagaagatgtgcctactnctcctgcagggacttgatgtgcagggggcgggggtgggggagtgacatttganatgggggcttccccttctgtttgagaagggggatggggga

SEQ ID NO: 622 - DNA, 416 bp, Homo sapiens
gactgaggaaggaaatgaagtgggctagtcttgcgcaccggactcgaccagcaagaacgacgctgcaacaggatccttctgcacacgtttattgggagagcttgattgcagaggcgaaaagaccctgagcccagaactggtgctgcttatataggcctaggagaggcgtgtctcacacccggattggttatgcactatgcctcatttgcatgttcctcatctgattggctactctctctctctgtacctcacagagcctcgttatcatacctcatttgcatgtctcacatctgattggttatactctcaaagcctcattatcatgcccgggccaggcagtgtctttgcaaaaaactttactgcatatgtacacattggttgttgtccaaacttatgcgtggggggccccacaaaat

SEQ ID NO: 623 - DNA, 305 bp, Homo sapiens
  misc_feature (1)...(305): n = A,T,C or G
ccatattaaaaatgcacatggttaatcngaacaagggctgaccattttgaaggacctttatttccttgatgctcccggtctttgtctccaccgtctatcgtgctctcatcgaatggctgagctctgtgtgcgtcacgaagggaattcacntntcagcaccnacacagcancttacanctgcctgtaactccagcttcanaggacccaacattctcttctggcctccgaggncatctgcacccgtccnccaccccgncnncatgcatagccaagattaaaataaanctttttttcttttttaaaat

SEQ ID NO: 624 - DNA, 177 bp, Homo sapiens
  misc_feature (1)...(177): n = A,T,C or G
gagttgctgcaaacagctctcctggngccaagggatgctcatctcatatttgaatcatcccgaccctcactgagcagacagctcccagagtaacactgactcagagagaaggaattcgagtcacccgggatatttaaaatattctagtagccacgtagtttaacagaaagaaaaaaa

SEQ ID NO: 625 - DNA, 173 bp, Homo sapiens
gggttccaagactgccctttgggattcaaacgggagccgctttggactgactggctgccttcctcctcctccccctcctcccccttctgcttcagatttatttattatatgtaagtacactgtagcagttgtaggacacactagacgagggcaccagatctcattgtgggtgg

SEQ ID NO: 626 - DNA, 311 bp, Homo sapiens
  misc_feature (1)...(311): n = A,T,C or G
agatctgtccagaaggancagggccaacctgcaaagaagatcagaccacacagccgtctagaagaacagaaaccagctgagctatctggaagagctttagaccaactgagacactgaggaggacactctccagcctgttgagctgcctgcaggctgtgcagtgtgctacaagttcccagcgttgtgagctgtcacccatgctggggtgggcctccgggatgcagctgtctttgagtcatttctgctccgataagtaacccctcacccatattcttccaagtaaccccaataaaactcatggcttaccaagt

SEQ ID NO: 627 - DNA, 100 bp, Homo sapiens
  misc_feature (1)...(100): n = A,T,C or G
agtctcgaaattcgataaggtatcttgcnatatattcagaactctccctcctagtgacngcaatgaattcgacccagaagaagatgaacctaccctaaaa

SEQ ID NO: 628 - DNA, 210 bp, Homo sapiens
aggtacctgagaggaccagaagatggtgtcagatcctcgggagctggaattgctggcagttgtgtgttgcctgacatcatgagtactagaaagttaactcaggtatctatctataagagcagtaagtgctcttaaccactgagcagtgtctctaacccaacatgatagatctgtatatataaatacatatagataggaaattaaaaaaaa

SEQ ID NO: 629 - DNA, 247 bp, Homo sapiens
  misc_feature (1)...(247): n = A,T,C or G
gggttccaagactgccctttgggattcaaacgggagccgctttggactgactggctgccttcctcctcctccccctcctcccccttctgcttcagatttatttattatatgtaagtacactgtagcagttgtaggacacactagacgagggcaccagatctcattgtgggtggntgctaccnnntntccatgccgaangagggggatcacanatagatatagaggtgaaaataaagatctcagttac

SEQ ID NO: 630 - DNA, 152 bp, Homo sapiens
  misc_feature (1)...(152): n = A,T,C or G
gatgtcccaggctccggacaacctgcaagccagagacgctacagaaactggaaccanaccctggtncncttccagaaaganngatngatcgaaagaatgaaagaaagaatggcaaaaattaagggtcacccngggggctccaagcctatgag

SEQ ID NO: 631 - DNA, 176 bp, Homo sapiens
gggttccaagactgccctttgggattcaaacgggagccgctttggactgactggctgccttcctcctcctccccctcctcccccttctgcttcagatttatttattatatgtaagtacactgtagcagttgtaggacacactagacgagggcaccagatctcattgtgggtggttg

SEQ ID NO: 632 - DNA, 128 bp, Homo sapiens; identical to SEQ ID NO: 464

SEQ ID NO: 633 - DNA, 426 bp, Homo sapiens
cccggaagcagaagagagaagagattgagaagcggagctgcaagttgtgtgtcaagccttggccccaccatggactcctccccgactctgccccactgaaaacgtcacatggttattttagcaaatggacgttcaggtagaccccctttccagcccttatcccaggagcccccacgagtaacatatgagaagcttctctgttcctttcttaaaactaacttatggggctggagagatggctcagcggttaagcgcactgactgctcttccgaaggtcccgagttcaaatcccagcaaccacatggtggctcacaaccctccataatgatacctgatgccattttatggagtgtctggagtcagctacggtgtacttaagaaataataaataaaacttaggggggaaaaaaaccctaacttaaaaaa

SEQ ID NO: 634 - DNA, 379 bp, Homo sapiens
  misc_feature (1)...(379): n = A,T,C or G
ggctggagagatggctcagtggttaanagcactgactgctcttccagaggtcctgagttcaattcccagcaaccacatggtggctcacaaccatctgtaatgggatctgatgccctcttctggtgtgtctgaagacagcgacagtgtactcatataaataaaataaataaatatanntaaaaagncnnantnncatnctnnnannttnntggactcanctacagtttgcctcccaaaatccagggtcaacactgcaccactgaactgtgtcccccagggtaccatcacagagaatggcaaaaaatgagcccacatatgcatgccaacagagtctgatattataggcttgntgttttggaatcttaaccccctggatctg

SEQ ID NO: 635 - DNA, 390 bp, Homo sapiens
  misc_feature (1)...(390): n = A,T,C or G
gccctgcacacagacaaatgtatacattcttggagaagactaccttcttccaggtgatgaccggggtgggcacagccttcacctcacaggaaaggaatacttgagtcccagtgacattgtgaatatctcgagggggcatgaggaccacgggagctggaagacaaaggaacaaccctgtgatggtttgcatatgctcagcccagggctttaagacgctcctcctggctgcctgaagttagtattcccctagcagcctgcagatgaagatgtagaactctcagctcctcctgcaccatgcctgcctggatgctgccatgctcccaccttgatgataatggactgaacctctgaacctgtgaacaattaaatgctgnccttataagaaaaaaa

SEQ ID NO: 636 - DNA, 290 bp, Homo sapiens
  misc_feature (1)...(290): n = A,T,C or G
ccagcctgaaacctgctngctcggcgnggaggcttcctgctcattccttctgncacgccgactgntggaacctgaggagccacacacgtgcacctttctactggaccactanataatatcggcagggaaatctgggttgccctcccccttacttcataantgggnagtttcaacnataaaatgaagagccttgatcagaaaggtaaganaatgagggccagntnaagatcgnnctgatccacggacaccaagttattccgnggggagacatggctagcttagccctgctg

SEQ ID NO: 637 - DNA, 355 bp, Homo sapiens
  misc_feature (1)...(355): n = A,T,C or G
cgagcctgggctagaggccatanattacttcttgaggaactctnanangncgagacagggaaggcaaagaacaaagacccnaaggaaannctgcagnctgtttatgagtgtatagagaaaacgtgtgagaaacttggacagctcaatattgatatttccaacatcaaaggtatttttattgagaattttcctctatagtccagctctgccaatcccattcatgaattcattctttcagcttataataattgagtctttataagctgcaagcctttttggtttttgtttgtttgtttgtttgtttgttggtgagactttgtgggaagaacaataaacaagattctcagttcccgtt

SEQ ID NO: 638 - DNA, 234 bp, Homo sapiens
agccaggctggatgaagaaaacttgaagaagattttccgggaggttcagataatgaagatgctttgccatccacacatcatcagactctaccagaggtcctgagttcaagtcccagcaaccatacaatggctcacaaccatctgtaatggaatctgatgccctcttctgctgtgtgtgaagacacctacagttactcatatatataaaataaatattcttttaaagaaaaaaaa

SEQ ID NO: 639 - DNA, 283 bp, Homo sapiens
cctggcccttcagaagtggcgccccgacttgtgcagcaaggtggcccagatccatggcattggaggagatgtagtctcccctcccccagcctgaaacctgcttgctcggggtggagcttcctgctcattcgttctaccacgcccactgctggaacctgaggagccacacacgtgcacctttctactggaccagagattattcggcgggaatcgggtcccctcccccttccttcataactagtgtcgcaacaataaaatttgagccttgatcagaaaaaaaaaa

SEQ ID NO: 640 - DNA, 249 bp, Homo sapiens
  misc_feature (1)...(249): n = A,T,C or G
gaggcaccctaggatacatttccacacaggccttgtggatgcccatctctactgcctgaagaagnacgntgtggatttnttaatggagaatagcagaacagncttcctaaatgaccancnncaccttanancncanttcgcaganactatccccagctggcnnaagncacgcctctggtagagcacaaggaggatcaaatccccaaacctgggattaaaatgaangcacattcttatattaaaaaagaa

SEQ ID NO: 641 - DNA, 410 bp, Homo sapiens
actgaggtcctactctcgctctcccagctattcgtccaagtctggcaaagaggagcccacctagcagaagctccaggtctcgtcgaagtcccagctactctcgctacagccccagcagggaacgggacctaaagtatggtgagaaagaaccacagccccgagaacgtgcgcgcaggaggcgacggtcctactcacccatgaggaagcgcaggagagactccccaagccacctggaggctcggaggataaccagtgcccgcaaacgccccatcccctactaccgacccagcccctcctcgtccagcagcctcagcagcgcctcctcctggtacagcagcagcagcagcagcagcagcagtagcagccgctcccctagccgcagttactcccggagccggagtccctggcct

SEQ ID NO: 642 - DNA, 389 bp, Homo sapiens
  misc_feature (1)...(389): n = A,T,C or G
ccaattgaggccgacttgggttgaggtagagctcngggcatgaggccataattacntgttgtggaactctaannggtcggacaggaagaatcnatgcnttaaanaaagacatcnctncattgtgatttgttcctgccccaccctaactgatcaatcgaccttgngacattccttccctggacaatgagtctcatgatctccccaccctgcaccttgtgacctccacttctgcccaaaagagataaccacgtttaactgtgcttttccactgcctacccaaatcctataaaactgccccgcccctattctccctttgctgactcctttttcgtactcagcccgcctgcacccaggtgattaaaaagctttattgctcacacaaaaaaaaa

SEQ ID NO: 643 - DNA, 100 bp, Homo sapiens
  misc_feature (1)...(100): n = A,T,C or G
tggtgggcccacctancacgcgtgcaaaangctccncgggtgctcaacttnttctagtcccaactgcgtacgtgcgacccacggaggcaataaatatcca

SEQ ID NO: 644 - DNA, 422 bp, Homo sapiens
  misc_feature (1)...(422): n = A,T,C or G
actgaggctcattctccacnaagtgctcaccngtctttgcgngggatgagagancacagcgcngngnangctnagagattnttcatccntcctcggaagtgctngancancatnttcagcttgtcttcctgcttgaccacgataagctacaggcagaaggcagatggtaaggaagggcaaatggtaaggaagaacgcatacacgcgtatgctccctccccagcttccttcctgatgacctgacaagaaatccaggactcagagcagggctactgcgctgagcataagagtacttgtctggagctggagagatgatggctcaatgggtaagagcactgactgctcttccgaaggtcctgagttcaaatcctaacaaccacatggnggctcaccaccatccttaatgaaaactgatgccctctt

SEQ ID NO: 645 - DNA, 303 bp, Homo sapiens
  misc_feature (1)...(303): n = A,T,C or G
aggttgtctcggagcaaagctcagatacgaccctggaattgatttacagaattgccagctgcccaacatggattcttggaaccanacctttagaattcaacaaacaaacnacccagggggctggagagatggctcagcactcaagagcactgactgctgctcttccagaggtcctgagttcaattcccagcaaccacatggtggttcacaaccatctgtaatgagttccaatgccctcttctggtgtgtctgaagacagcgacataaaatgaataaatctttttaaaaacccaaaaaaaaaaa

SEQ ID NO: 646 - DNA, 238 bp, Homo sapiens
  misc_feature (1)...(238): n = A,T,C or G
caagactgccctttgggattcaaacgggagccgctttggactgactggctgccttcctcctcctccccctcctcccccttctgcttcagatttatttattatatgtaagtacactgtagcagttgtaggacacactagacgagggcaccagatctcattgtgggggcgcttctggatagaggctgtggcagaagtttgacgggcccttnntttgcttgcaagggatgggatgtgggct

SEQ ID NO: 647 - DNA, 339 bp, Homo sapiens
ggcactccagttaagagattacctcaaatctgaaataaggctttggacttgtgaacagtattggaattgttgaagaatatggggacttttgaagttgtcctggacatatgtttgcattataagatgacaatgaaggctgccaggaaaactcagaaagtattgtattaccttttgacttgagttcaatccccaaagccaaagtgtggaaggagagagctgattcctgcaacttcttctgacttctatagcactcacatatatcgggcacatgcatgagtatgcacacacacacacacacacacacacagatcgaaaatagttgtaataaaaaaaattaaa

SEQ ID NO: 648 - DNA, 427 bp, Homo sapiens
  misc_feature (1)...(427): n = A,T,C or G
gagcctctggtgggcagtcacaagcccacggattccaccagtgaccccaggcctgctcacatgagtgacgcgttcctccccatggccagcagcagagcggactgaatgctgggtgacaggctggcctcagactccggtgctcaaggatattcttgcttcaggttcccaaatagcactgcacactgcacacgtgaatccccatgcctgatggtggatnnctgagttngaggccannctggnntacanagtgagttccaggacanncngngctacacanatnaaccctatcttgaanaacacattaacaaaactgacaaataaatgttatcctttttaacaggtaatagagaatggccccanggggaccctgnaaaagggacttntaatccatcaacatggagcttgagtcttcttgggaagaaaaaaa

SEQ ID NO: 649 - DNA, 327 bp, Homo sapiens
  misc_feature (1)...(327): n = A,T,C or G
ctgaggggactggagagctgaaggagcgccagcttctccagaattggacttctcagaacctttaatatgctaatgtgcattgtgaatctccaagatggggatatgatatgcagcattcttgaatacttctaatgacagggagcccactacctcataagtaaacccagacaaacagagataatttaacagaaaagaaacatatatcgggggctggagagatggctcagcanttaagagcactgactgctcttccanaggtcctgagttcaattcccagcaactgcatggtgactcacagccatctacaatgtgatctgatgccctctt

SEQ ID NO: 650 - DNA, 386 bp, Homo sapiens
  misc_feature (1)...(386): n = A,T,C or G
agactgaggtatctgagcgtnngagtcaanctggattggcaatngggttagcatggactcccttgggtggcannatnatgtttggggaancangnttaatggncggtgaangccaactancactgaccggncannttggggacgtnntgaaggantctgnccatctnancntnagntgcnttgaaagcnatgcaaacaaataccacctgactaatgcttttggaagttttgatcttnttgacaacacagacatcgtgagatgccaggacttgnaaggngaangngngtntcactcctgggccactgccaaggcttangcatgaaaacttgacatgcgggactggagagatggcttantggttaanagcacttgctactcttgcaga

SEQ ID NO: 651 - DNA, 448 bp, Homo sapiens
  misc_feature (1)...(448): n = A,T,C or G
gactgagcttccctgggcccccgagatggctgctcttctgggcgtcccctcccctggccggggccgaggacactgctgctgcgcaagagtcttcaggatggctttggtttcaccctgcgccacttcatcgtgtacccacccgagtcggccgtgcactgcatcctgaaggaggaagagaatggaggccgaggaggaagaggaggaggaggaggaccctccccacggcaccgcctggagcccatggacaccatctttgtgaagaatgtgaaggaatgtggccccgcccacagggcggggcttcgcacaggagaccggctggtgaaggtgaatggggagagcatcattgggaagacctactcccaggtcataggtctgatccaaaaaaagngacnacacccttggactntntattatgcccaaggacgaaggacatcctccagctggccta

SEQ ID NO: 652 - DNA, 100 bp, Homo sapiens
  misc_feature (1)...(100): n = A,T,C or G
ccctcaaagctcttgctcgctctgngatgaagattgggcggatngaggatgtcacccccattccctctgatagcactcgaanaaaagggggtcgtcgcgg

SEQ ID NO: 653 - DNA, 268 bp, Homo sapiens
gcttaagtttaaaacactgaggagttggcatccattggaagaccttgagatcctctcagctcagaactccaggaccgatgcatcttcccaccaccttgaagcactgaaacaacaagaaaagccgggcgtggtggcgcacgcctttcatcccagccatcgggaggcagaggcaggcggatttctgagttcgaggccagcctggtctacaaagtgagttccaggacagccagggctacacagagaaaccctgtcttgaaaaaccaaaaaa

SEQ ID NO: 654 - DNA, 239 bp, Homo sapiens
  misc_feature (1)...(239): n = A,T,C or G
agaactgaagcccctacgatacatttnccacaggccttgtggatgcccatctntactgcctgaanaagtacgtngtggatttcttaatggagaatagngaacaggcttcctacatgaccccancaccttacancacattngnaganactatcccnagctggcataagtcacgccnctgcttgagcacaaggcaagatcaaatccccaaacctgggattaaaatgaaagcacattcttat

SEQ ID NO: 655 - DNA, 219 bp, Homo sapiens
  misc_feature (1)...(219): n = A,T,C or G
tacgacactcaaaccttgggggttgcggnctttggcnggnttatggttgannctgccntcnncntcttnctgntgtcancattctccatgaaggagacgccctctgaaaaaacccttgccaaccagcgcaaggagatggcgaaaactcaccaccagaaaggagagaagaaaaagaaggagaaaaccgtggagaagaaaggaaagaccaagaaaaaaaaa

SEQ ID NO: 656 - DNA, 312 bp, Homo sapiens
  misc_feature (1)...(312): n = A,T,C or G
gaccatgacatgagcagacngtcggacagctactaataacacctctgatggaacgctttttgcaggatgttctgcgacaccacccatataattaccaagacaacagatctgcaccaaatgagccagaggcggcggcagcagcggcagcagcagcagatcctggatcacctgaagtggtggtggttttggatgattctgatgagaaggaggatgatactgcagatagcggtgcagagaggaactccgaggattcaggatctgttgaagagatagattatagacctggtacttctcaggaacacgcagaagttt

SEQ ID NO: 657 - DNA, 208 bp, Homo sapiens
  misc_feature (1)...(208): n = A,T,C or G
cgtcctgggagagagatcgcanaangagcccgctcaagatctcccacccgaagacgctccaggtctccaagacgacatagatccacatctccctccccttctcgactgaaagaaagaagagatgaggaaaagaaagaaactaaagaaataaagaacaaagancggnggatcactgnggaagacctggagggtaaaacagagggcaccg

SEQ ID NO: 658 - DNA, 337 bp, Homo sapiens; identical to SEQ ID NO: 11
  misc_feature (1)...(337): n = A,T,C or G

SEQ ID NO: 659 - DNA, 417 bp, Homo sapiens
  misc_feature (1)...(417): n = A,T,C or G
actgaggtctgccctgctgctgattcgtgtttgctatcccagcactactgaactggactgctggtatatcgtggngtagctgcaagtggattgagctgctgctgctgctgacctgtgaactgaacggctgatttcctgacaatgcagattggatttgctccaaagaacaatttctaaacaggtctatttcccctgtctcccaataacctttcttttctactacctctggtgggtgttgggttagaaggaaggtcaaagcatttaagaacaattattaaaattagggctgggaaaaatgtaagcatatacacaatgcactgtggcatatatggtcatgtgacacacatatacatgtaataatcatgtgacacacatatacatgtaataagtgaatatgnttttttttaattaaaacag

SEQ ID NO: 660 - DNA, 190 bp, Homo sapiens
  misc_feature (1)...(190): n = A,T,C or G
tgatacacacaggcctntgaggaaattntaatatgttctggaagctctaaagaaaagcaagagtgcctggcagtggtggaggacacctttaatcccagcacttgggaggaagaagcaggcagatttctgagttcaagaccagcctggtctacagagtgagttccaggacagccagtctcaaaaaaaaaaa

SEQ ID NO: 661 - DNA, 464 bp, Homo sapiens
  misc_feature (1)...(464): n = A,T,C or G
aaccctagattcacggacatgccggaggagttcaacatggncacacacgactgtcacagacggcagattctgaacctacatcgtgagcggaagatgtagcctttctacaggacgcatcgagatgcaaggcaataccgtgtcatagaatgtcgtaccacccaggacgagggtgtccccggggccgaggaggacacggagccagaccttcagcaccagctttcagaccccaaaacctgcgacttcttcatccccaacagccgcctgcgcagtatcaatatgagcctccgagcgccccctcttcctcctactcgaactctcaggcccccagcactcaggaggcagaggcataaagatctcctgagtttaaggccaggtctacagagtgaggtccaggatagccagagccacgcggtgaaaccctgtctcaaaaagaaccaaattaaaccaaatcaaaccaaaaaaaa

SEQ ID NO: 662 - DNA, 389 bp, Homo sapiens
  misc_feature (1)...(389): n = A,T,C or G
ctcttgtggcctctctggacacagtatgcgcatagtgcagagaaatacancctgaaagctggncnnggtggctgtatgcctttaatcccagcacttgngaggcagangcaggcagatttgngagttcanggncnncctggtctacaaagtgagttccaggacagccagngctatacnganaaaccctgtgtcgaaanccagcatacatannancganngacnagaanacagnttcaggattcttacntataataantaaatcttttnttcaaggatggaactccaccctttacttgggtntaagtatgtatggaatgttntgataggacatannaatagnggncagatgtggaaatggnagggagacaaatatacatgtgaaataaact

SEQ ID NO: 663 - DNA, 609 bp, Homo sapiens
  misc_feature (1)...(609): n = A,T,C or G
gagccttgctgacccaggctgnaacatcactgaaaagttccaccccaacatgatttacaactntgaatgcctgcgngngtngnggcccctgnacagtaccgngcagncagcctacaccactcaatgnaagagtcctctcctccattgctggnccctgatcacatggcttaaagctaatattnacctttgnttcctacgccaaccaaaggngaatnccacatctntgntcacatcngggnnnctactgaaaactganccttcaagcttactgaccgnaaaggatgacttatcggatatatgaggaagacacattctgnntgagctctgcntgcctcttccttgtgtaactggttcttnttgaatatcattgnatggagacgccnccatgagcattcttcaacttccagacagggtttccttgannagctctagctatcctggaactatatntgtagnccaaggaagcctcnaacccacagngatctgnccgcctctgctttctgacatgctaggaataaagacacatgccaccactaccactcancactcaaataatatatccttcttccccctgtaattcctttccaactcccctcccatctgaatctt

SEQ ID NO: 664 - DNA, 407 bp, Homo sapiens
  misc_feature (1)...(407): n = A,T,C or G
tgagtgttaggagaattcatgcatccctgtgaagatgacatcgtgtgtaaatgtaccaccgaggagaacaaggtgccctacttcaacgcccctgtttacttagaaaacaaagagcaagtcgggaaagtggatgagatatttggacagcttaaagatttttatttttcagttaagttgtcagaaaacatgaaggcatcttcctttaaaaagctacagaagttctatatagacccatacaagctgctgccgctgcagaggtttctgcctcgtcctcctggngagaaaggacctcccagaggtggcggcggnggcggcaggggaggtcgaggaggaggaagaggaggcggtggccgaggtggtggaagaggtggtggttttagaggaggcagaggaggaggtgggggctt

SEQ ID NO: 665 - DNA, 330 bp, Homo sapiens
  misc_feature (1)...(330): n = A,T,C or G
acatgaccttgcaagttccntaggnggggggccattatcatnatggcattaantgcacagnaggatccaggcgggcatagctgctgganangctgagagttcnatatcttgctctgaaggccaacannagatgtcttccgntcaactaggnggagggnctctggangcccncccncacantgacatacttccttcaacaaggccacaccttccancaggagccncctcattggcggagcatantcaaaccaccacaagaagtcagactcccaccnangggatgaggcataagcctctataactgcatgagaaataaaagacagaggccgg

SEQ ID NO: 666 - DNA, 356 bp, Homo sapiens
  misc_feature (1)...(356): n = A,T,C or G
ttgcctcctcactttcctgggcattcctncgagatctcctgcctctcaaccttngctagtgctattctctgtgcctgggacgatacctttgactcatcttcgactgacctaatggagagagcttgggctttggaggcagagagacctgggttcggattttggcttcacagcttattatttggacaagtcctttggaaaagtatttaacattctggagccccagcttcctaacctgtaaaaatggagatgataacacctaccttgcagggttgttgtaaggattaactgaaattatatatgtatctaatgcaattaacatatagtcaataaatgacacgtcgctgtaaaaaaaaaaa

SEQ ID NO: 667 - DNA, 323 bp, Homo sapiens
  misc_feature (1)...(323): n = A,T,C or G
tgccaggcccactgctggancctgtggagccacacactgngcacctttttactggnccanagattattnggccgggaatntgggtcccctcnccnttccttgataactgnnngnnagnagcagnanaantggagntttgatcacgaagangatnangaaagaggtatncacatggcccttaggctaaagtcacacagccagctcttgctggctgtcaaaggctcttgattttctctcagagcattttatttcactttgatttgggggaaacaaaagtggaggtacaatcaatccttgctgattgtgaaggtcaaaaaaaaaaa

SEQ ID NO: 668 - DNA, 317 bp, Homo sapiens
  misc_feature (1)...(317): n = A,T,C or G
gactgagtattactgcgactatcaaaagtaggntgttgacatgggagacacccgggcgggcaccaaggctggattncatcacggcatggaatgagcctcaccaaggcttttgaaaatgtccttccgnnctggagagatggctcannggttaagataaacaccaacaacttttccagaggtcctganttcaaatcccantaaccacatggnggctcacaaccatntgnaatagggtctgatgccttcttctggtgtgtctgaagagagcaatggtgtactcatatacattaaataaataaatcatttaaaaaaaagaa

SEQ ID NO: 669 - DNA, 175 bp, Homo sapiens
gtagtagctggcaaccctgtggaccttggcgacctaatgctaacagctctgacagactagtgctaacaacttagcaacaaagcatcaagaagcctggggtggcaggggatgggcctcccccctttataagagcagactcttagtaaactttgggccatgattggaaaaaaaaaaa

SEQ ID NO: 670 - DNA, 261 bp, Homo sapiens
  misc_feature (1)...(261): n = A,T,C or G
cttcttgtggaaatctgaanncacggacgggnaacactgcctggtctccatancaggaactacagccaggtcctctgaaagagcagccagtgctcttaacccccaagccatctctccagcctgagagtgcgtgttcttatcatgagaagacaaacagcagtggagttggcaagctgcctcagtgggtaaaggtacttgctgcaaggcttgcagcctgatttcgattcccagaacccagagaatagaagtccgaaaaccaac

SEQ ID NO: 671 - DNA, 322 bp, Homo sapiens
  misc_feature (1)...(322): n = A,T,C or G
tccttctcttaggaggctngcttcactggggccccctnagnnagggngttgaaaccctctgnaccccattatttcntttnncatncnctttnatgcttctnttcggaacagtcagcggnagtngaaaccttnttccattnggtcctcgtggcaanggcagagattgctccagcagctccacacagtatgcaagacatcttttataattnttgntttttgaaatggggnctcactgnatagctttggcttacctgtaacattctcttgcttttacctcctgagtgctgggataaaaggcatgnaccacctatactcaagaata

SEQ ID NO: 672 - DNA, 201 bp, Homo sapiens
  misc_feature (1)...(201): n = A,T,C or G
actgagggcaggtgagatggctcagcanntataacagnttgttgcacaagcctcaggacctgagttcaattcccagaacccatggaaaagatggaaggagagagctgacttgacaaaactgtcttctgaccactgtacacggactggagccacggactgcattgtacaggaaaataataacaatttgtatgaaaaaaaaaa

SEQ ID NO: 673 - DNA, 200 bp, Homo sapiens
gttggatctcctggaaacatgaatcacagaaaggtgtgagctgccattcgggtcccaggaactacagccaggtcctctgaaagagcagccagtgctcttaacccccaagccatctctccagcctgagagtgcgtgttcttatcatgagaagacaaacagcagtggagttggcaagctgcctcagtgggtaaaggtacttg

SEQ ID NO: 674 - DNA, 247 bp, Homo sapiens
gactgagaatgttggcttccagagcgctgagcctgattggcaaagagagccatttctacttcggtgtgccttcgagcacatggtgagcaggactttcactcccttccctgcccttttctttctcctccctttggtttttcatgacagggtttctctgcatggctctggctgccttggagcgcagagacttaacctgcctctgactcccatgttctgggattaaagatgtgcaccgcaaaaaaaaaaa

SEQ ID NO: 675 - DNA, 185 bp, Homo sapiens
  misc_feature (1)...(185): n = A,T,C or G
agtttaactctctggagaccttcttgcaacaggagacaaaggtggcagagttgttattttccagcgggaacaagagcacccacatggcggctcacaaccatgagatctgacgctcttctggtgtgtctgaanacagctacagngtacttacatataataataaataaatgtttaaaaaataaaaa

SEQ ID NO: 676 - DNA, 183 bp, Homo sapiens
ggacggtgtggaaaacaagaacagagagatatgccaaggaatgctgaccataatcagaagctaaaagaggcaaagaacagtctctctcctagagcctccagaggggcctcaatatcttgattgcagacttctgggctccaaaattttgagaagaataaattcctcttgttttaaaaaaaaaaa

SEQ ID NO: 677 - DNA, 601 bp, Homo sapiens
  misc_feature (1)...(601): n = A,T,C or G
actgagggaggagtacgtagtatcccntctccntggtcngctacctnnttgataggaantggnnntganngntgattncacctgncncnctnantggggnaacctgnggagccanncacntgcnnctttctactgnaccagagattattnggnggnaatcgngtcccctcccccttccttnataantgangnagcancaatnaaatttgagccttgancagaagntaaaanaacacttgntgctgangagggactgtnntccantgaatgccnangtcacagagtttagaaatgcgactttcagctcattccttccattgttggacaaggatcccctgccccaggacttctctgtgaagatggctccactcttcaaggacttcatgaccacctataaccggacttatgaatcaagggaagaagcccagnggcgattgactgtctttgcaagaaatatgatacgagcacagaagattcaggccctggaccgcggcacagctcagtatgggatcaccaagntcagtgacctcacagaggaggaattccacaccatctacctgaatcccctcttacaganggagtctggcaggaagatgagtcc

SEQ ID NO: 678 - DNA, 322 bp, Homo sapiens
  misc_feature (1)...(322): n = A,T,C or G
cagtgtggacttcccacgcactgcngatggtgacctgnctggcnctgtgcacnctnaactgcnggaccatnactttnagccantgaggcctggngaacccatnttcaagcttttcancggagaanacgtnctgtatganggggactccattgngtaccctgtgtgnattantgaggcnagccantnnngaacatncctccatggcctntgcatcagctcctgctccctgacctgcttgagttccagtcctgacttcctttggtgatgaacagcagcatggaagtgtaagccgaataaaccctttcctccccaaaaaaaaaaa

SEQ ID NO: 679 - DNA, 289 bp, Homo sapiens
  misc_feature (1)...(289): n = A,T,C or G
gagcctttgttctctaggctcaaggtgctccagtgagtgagacaagcgagcgaaaaagcagctccagaaggcctactcaagaaaagaagacctgggctggtgagatggctcagtgggtaagagcacccgactgctcttccgaaggtccgaagttcaaatcccagcaaccacatggnggctcacaaccacccataatgcgatctgatgccctcttctggtagctctcttcacacagtgtacttacatataataaataaataaataaataaataaatcttaaaaaaaaaaa

SEQ ID NO: 680 - DNA, 313 bp, Homo sapiens
  misc_feature (1)...(313): n = A,T,C or G
gcagaggcctggctgtctctgttggtacgngccactgctgctgattcctgtctgctgtcctgactctatggacctggactgctggtgtacccatgaagtgtttgtgagtagacggagctgccactgctgacctctaaacgaaactgccgatttccagacaacacaaatgggagttgctccaaagaacctttctaaacaggtccacttgccccatatcctttctttgccactacctctggtagatggtgggctaaaagatgttaaaacatttaagaaccatcattaaaaatagatttaaaataattaaaatgac

SEQ ID NO: 681 - DNA, 441 bp, Homo sapiens
atggagcaactatccgatgaagagattgaccatggtgctgacaaggaagatcaggacctggataaaatgtttggggcctggcttggagaatccagctccagcattaaatccggatccagttcttccagtatcccggagtctcagtcaaaccactctaatcagtctgacagcggagtgtctgacaccctgccaactggacatatccgttcccaaagtaccgtgagctccatcttctcggaagcctggaagcgaggcactcagctggaagagtccagcaagaggaccagagttcaattcccagcaccctcgtcgggcaactcaaaaccacctataactccagctccaaaggatccaatgtcctcttctggcctccaaggcacctgaacatgtgtggcatacatacacttaaataaataaaagtagatttttaaagaaaaaaaa

SEQ ID NO: 682 - DNA, 294 bp, Homo sapiens
  misc_feature (1)...(294): n = A,T,C or G
gctgccatggcgtcacgcatcgggctgcgcatgcagctcatgcgggagcaggcccagcaggaggagcagctgagagcgcatgcagcagcaggctgtcatgcattatatgcaacagcagcagcagcagcagcagcagctgggtgggccccccaccccagccntcaccncccctgtacaccccnanacntncctntntgngcctntnggcttctctgtgctnngtgacccccaaatgatgggaaacagttttcttgtttaaagaacagtaaagccattctatatacaaaaaaaggg

SEQ ID NO: 683 - DNA, 219 bp, Homo sapiens
cccaagtcctgccttcatgccaccatgctccccactatgataagtggactacacctatgaaaatgtgagcaagccccagtaaaatgtcttctttggttgtggctcataatcatctgtaatgggatatgatggactcttctggtgtgtctggggacagcaacaatgtactcatacaatcaatcaatcaatcaatcaataaataaataaatgcagattcag

SEQ ID NO: 684 - DNA, 449 bp, Homo sapiens
  misc_feature (1)...(449): n = A,T,C or G
aactgggaaacgtaggtctgaatggagatgggctgcagaccgagcagctattgtcagcccgctggaactggcttcaggcccatgtttctgacttggaatatcgaattcgtcagcaaacagatatttacaaacagatacgtgctaataagatatttgtgcttggaatatagcctggatcatctgcaagagcagtaattgcacttaacccctgagccgtctctccacactgcatgctgtgttttaaactgttagtatggggctggtgaggtaatttagtgggttagcgtgcttgctgccaaccaagcatgatgacccaaattgaatcttcaggacttccatgggtggaaagtgactcatgtgagttgncctctggtgtacttatangcatggggcgtgcacatgccnacataaataaagggaaaataaaatttaatcttttcctatcttac

SEQ ID NO: 685 - DNA, 424 bp, Homo sapiens
tgaatcgaccagttttgagaggagaagatggggacaaagcggctcctcctcctatgtcacgcacagctgtctgggattcctatgccaccaccacctatgggacttccccctctacagcctcctccaccacctccaccacctccaccaggccttggccttggctttcctatggctcacccaccaaatctggggcccccaccacctcttcgagtgggtgagcctgtggcgctgtcagaagaagaacggctgaagctggcacagcagcaggcagctttgctgatgcagcaagaggagcgtgccaagcaggcagctgtgttaatggagcaggaacggcagcaggagatcgccaagatgggcactgcagtccctcggccgcctcaggatatggggcagctgggtgtccgtactcctctggggcctcgcg

SEQ ID NO: 686 - DNA, 558 bp, Homo sapiens
  misc_feature (1)...(558): n = A,T,C or G
tgagcatcttgccaaagtccaggcactccctacacccagggacagctccagagaagcaacctccagatgctccaacctcctgggncggncncagacacttcaactggacttgttccttctgatctatccacagaccctggacagcaaggaaagagccaactcctaagactgaacaaactcccccatatccattcttctaggttccctagagacacatggccccaaagccagcaggaagtnggcagatatcacaatgaccctatttctgcttcaccatcacccctttctaatcttttcctttttaattctggctaagctccgccccacagttacctggcaacaggcaggtgtgcctgacccactataaaaaggggccgcttgccccctcctccctgtcttgctcctctcttgctctcttgctttctgctacccttccccccaccccccacccccaanccccgngctcatggtcaagcctcttctctacttctctctctntctctctccctntntctgnctttctttgctntactaccctctaaactcccatccccatgt

SEQ ID NO: 687 - DNA, 489 bp, Homo sapiens
  misc_feature (1)...(489): n = A,T,C or G
gactgagggcccacctgtctggaaatggatcgttcttactgaacttcgcaggctgcgcagtgtgcagtaagcgggactttatgctgatcacaaacagatccctgaaagaggaagatggagaagaaatagttacctatgaccatctgtgtaagaactgtcatcatgtagtagccagacaccgagtatacattcagcatcatggatgaatttcaggaatataccatgctgtgtctgttgtgtggcaaagctgaagatactatcagtattctccctgatgacccccggcagatgactctgctgttctaagcctcccgtggttctcttgtaactgtgttggcttggtttaaaatagagcaagcctagggctggagagatggctcagtgggtaagagcacccgactgctcttccgaaggtccgaagttcaaatcccagcaaccacatggnggctcacaaccatctgtaacaagatctgactccttcttctggag

SEQ ID NO: 688 - DNA, 448 bp, Homo sapiens
  misc_feature (1)...(448): n = A,T,C or G
tgaggagctggtgagatggctcagcagttaaaagcactgactgctcttctgaaagtcctgagttcaaatcccagcaagcacatggtggctcacaaccatctgtaatgagatctgacacactcttgtggtgtgtctgaagacagctacactgtacttatttgtaatcataaataaatcctgggccggccggagctagtggagtgtaccagagcgagcagaagtcctaaattcaattcccagcaagctgatgaagcttcggtacagctacagtatgtactcatctacataaaataaatgattaaattcttaaaataaataaataaatctgattctattatnaaaatttgctactacagnttaaacttctaatggactctngatcttagtgccttattgggataaatactttgcacagatttttntncctttggnagctatgtctcatttc

SEQ ID NO: 689 - DNA, 360 bp, Homo sapiens
gtggacatcgaggccctgtgggtggccctacagcgtggaagggatgaccgagctttgggacatgtcctggaaacctaaggtgctggagctagaagagacttgatagcacttcagagaccatcaggctgtttcgtggaacttccaccaaagagatgcagaaatggagactccagagctggagagagagagatgactcaactgttaaaagcactgactgctcttccagaggtcctgagttcaattcccagcaaccacatggtggctcacaattatctgtaatggggatctgatgccctcctctggtgtgtctgaagacagtgatggtgtactgacatatatgaagtaaataagtaaattaat

SEQ ID NO: 690 - DNA, 530 bp, Homo sapiens
  misc_feature (1)...(530): n = A,T,C or G
atctgaggaccccggcgagacgcagnggccgccaagagcttcatcttggacatgtatgcgcgcgtgtacgcgagctgcgcagagccccaggacggtggcaggaaaggctcccgcgcgcgccgcttcttcgcacacttcacctgtgccacggacacgcaaagcgtccgcagcgtgttcaaggacgtgcgggactcggtgctggcccggtacctggacgagatcaacctgctgtgacgcgggacagggaaccccaagcgcgacgcggtcgtggcgaggacatacctccccctggtggccgcgcgtggaactgcaggtccaggagctgccaagtggggaagccagcccacagggagagagtccctgcttcctactgggcccccaagcccagctcccctgtaatttattccctcgcccttcttctagtttgttggagaaaggacatgagccgggtctttaaccccagcgctccggaggcagaggcaggaggattttctgtgagttccaggaccatgttttcaaaaacaaacaaa

SEQ ID NO: 691 - DNA, 350 bp, Homo sapiens
  misc_feature (1)...(350): n = A,T,C or G
agactgaggctgtttcccttgcaatttgtgcagttgtttgtgcatgatgagagccgncagcagctcaaggtcaagttccgaactggccgcgccttctacttgcaactgcgctctcctncagagacccgcgactgcgagtttgnccgctggntgcggntgctctaccgcctgcgattccactcgcccacctgcgcagtgcccttcacgcacgaggacactgctgcctgangaagaggaggaggaggaggnggaggagggtcanaantcaggcgagatgagggaggacagccctcagtggcatcacagggtcaggatggnggctgtttacacagngctttctgctttccagg

SEQ ID NO: 692 - DNA, 315 bp, Homo sapiens
ccccctccaaggaaacagcccacctggaaacctcctccttggaatggtgtagcctcccataagcctgaagcaggctgagccaggcttgactttgttgccactaaggagatcacctggggtggagcctgcctccctggatcactctattgttctgccactgccactgctgccacctgctgcctagctgttctggagcctacacgtggtcacttgcagctgggctccaagaatgatttggccgggaatgggctttcccctctcctttataaagcgtgtccgccattaaaaatttgaaccttgatcagaaaaaaaaaa

SEQ ID NO: 693 - DNA, 422 bp, Homo sapiens
  misc_feature (1)...(422): n = A,T,C or G
gaactgaggaagaagatgagcctgaagtccnaacgcaggggaattcatgtggatcaatntgagctcctgtgcaagaaaggatgcggttactacggcaaccctgcctggcagggtttntgctccaagngctggagggaggagtaccacaaggcccggcccgaggcagatccaagaggactgggaactggcagaacggatatttgatcacactgtgaacctcangattgggntatttactgaaantaactggtgggctggcaagatggctcaccctgtaanagtactgatcgntctttctgaacatcctgagttcaaagcccttgcaaccacccgtaatgagatctgacgccctcttctggagtgtcagaaaacagctgnagngnacttatgtataataattaaaaaaattttaaaaaaaaaaa

SEQ ID NO: 694 - DNA, 294 bp, Homo sapiens
  misc_feature (1)...(294): n = A,T,C or G
tgaggtggggtctttcattgtcagcgctcatttccctgctgnaagcttggcgnagccggnnanagctgcggggtgaacattgagaggnaccggcatagcatccgctccggctcctcacggagaagatggccgagggcgagcggcagccgccgccaggtccggagttcaaatcccagcaaccacatggtggctcacaaccatctgtaacaagatctgacgccctcttctggagtgtctgaagacagctacagtgtacttacatataataaataaataaatctttaaaaaaaaaaa

SEQ ID NO: 695 - DNA, 460 bp, Homo sapiens
aactgaggctggcattgaacttgctatgtagctgagatggccatgaactcatgatcttcttgcctcttcctcccaagtgcctgggttacaggcctgtgctactatgcccagtttgtgtagtgctgaaggtcaaattcagcatttccccgcccgagaggctagcactgtgccaactgatttgcatcgccagccacaaagtgaagctggagccctgcgtcagaagtctagttttataggcaactgtcctgtgatgtcagcggtgcagcgcgtgtgccaccttatttagctaagcagatcgtgtacttcattgggatgctgaaggagatgaatgggcttcgagtgaatgtggcagttaaacataccttcattttttggacttgcatatttagctgtttgaacagagttgtttcctttctgaatttcaaagataagactgctgcagccccatcacaatatccag

SEQ ID NO: 696 - DNA, 495 bp, Homo sapiens
  misc_feature (1)...(495): n = A,T,C or G
aactgaggtgaagcatggctaaaagcctgcggagtaagtggaagaggaagatgcgggccgagaagagaaagaagaatgcgccaagggagctcaacagactgaagagtatcctcagagtggacggggatgctctaatgaaagacgttgaggagatagcaaccgtggtggtagccaaacctcgccaggagaaaatgcagtgtgaggaagggcnggtgtgacggcgcagatgaggaaaaggatgacatgaaaatggaaactgaaattaagagaaacagaaagactcttctagaccagcatggccagtacccagtgtggatgaaccagaggcaaagaaaaagactgaaggccaagagagaaaagaaacgagggaaaagcagagcaaaggccgcgaagggcctggcctggtagaccttaaagactggcaagggagacaggcgtggtggtgcacccctttcatcccagcactcaagaggtggaggcaggtggatctctgtg

SEQ ID NO: 697 - DNA, 445 bp, Homo sapiens
  misc_feature (1)...(445): n = A,T,C or G
gttgatgggaacaaacacagagacccacagctgcacantgtgcagagactgagaaaccttggaactcgcagncctaaatgggatgtgtccatnagatntctcntgctanngactcagggaactctggcagaaagactgtaggagccaacgagnatgaanactgccacaccacctccngtnagatctgngtgacangttccacagactgaggcgattgacctcaaaagggggaggcctcatggacccagttgtggaactcttcggcggaggaaaaatattgagccgtagntctcatggcaatatatctgttttgnttnctnttattccttttcttatttacatgtncctggnagctgaggccaaggtcttaagcgagaataatgggtantaaaccatccntanagatggggccactancatgancttctncccagggaatcaaagc

SEQ ID NO: 698 - DNA, 382 bp, Homo sapiens
  misc_feature (1)...(382): n = A,T,C or G
actgagcctaaattgtatagatctgtgattgaagatgttattaatgacgtacgagnacatttttctggatgacggagtggatgaacaagtcctgatggaactaaaaactttgtgggagaataaactaatgcagtctagggcagtagatggatttcattcagaagaacagcagcttttgttgcaagttcagcagcagcatcaaccccagcagcagcagcatcaccaccaccaccaccagcaccagcaagcgcaacctcagcaaacggtacctcagcaagcacagacccagcaggtcctcattcctgcatcccagcaaggtgagaaggctggaggtccctgttgtgccttacaagttacacttgtcttttgaaagtaaaaaaaa

SEQ ID NO: 699 - DNA, 382 bp, Homo sapiens
  misc_feature (1)...(382): n = A,T,C or G
tcatctacaaccacatcaccttctncatcatgatcctctacctnactgaagctgantccacagtgctgcctgatccaanattgtcatcggaggaggctgaaccgtttcaccccntgcgggnganactcccaggcngnactcatcgtanctggnaccccatcggggatatgccaaacacactggcagttctcctcaaacgtgacaccagcagncttcacccagcannaagaccaagcagcgccactccagaacgcagagccccctccaggccttctcccagattacctgattttgattnaactttgggaaggggnatctgtctaaaanaaaatcntccatttcatctagattttccagttttggcnaatataggcttttataa

SEQ ID NO: 700 - DNA, 222 bp, Homo sapiens
cgggcagcgatgatgtgacgaacgcagggtattctgcagccaattctaattcaattttcgccaactccacgggtttctctgtagccctggctgtcctggaactcactttgtagaccaggctggccttgaactcagaaatctgcctgcctctgcctcccgagtgctgggattaaaggcgtgccgccatcacgccagcaaataaataaatcttaaaaaaaaaaa

SEQ ID NO: 701 - DNA, 100 bp, Homo sapiens
  misc_feature (1)...(100): n = A,T,C or G
ggaactcactgcgtanatngggctggccttaaactcactganattngtctttntcctgcctgctgaaattaaagtngngcgtcaccctgaaaaaaaaaaa

SEQ ID NO: 702 - DNA, 100 bp, Homo sapiens
tgaacaagaagatgtccacgtccaagaggaaagccaggatgggcaagaggaagaagtcacctgttgaagatgttggacagagagagtcagaaaaaaaaaa

SEQ ID NO: 703 - DNA, 483 bp, Homo sapiens
  misc_feature (1)...(483): n = A,T,C or G
actcctctgagagacttgcagcagttggatttagccggggcaccgtgtgagcagtgacggatggctttacttcatgaatgtgtttgagaatctgaagcagttagtgttttttgactttagcactgaggagttcttaccggatgcagcactggtgaggaaacttagtcaagtgttatccaagttaactcttctgcaagaggtaaagctcacgggctgggagtttgatgactatgatattagcgctattaaaggcacctttaaactagngactgcttaatgcacctgtgccaccaaatactccaggactccctcacttccagcaaatcattaaaagctacgcagaagtggggccacagagctggctcagaggttaagagcactggctgctcttccagaggacctgggattgattcgcaccacctacaaggtggctcacaaccatctgtaactccagttccagggggatccaacattttctgatct

SEQ ID NO: 704 - DNA, 406 bp, Homo sapiens
  misc_feature (1)...(406): n = A,T,C or G
gattcttcgacttcacatccacagctgcccattgttgggttagctggactacaaattggcactgtctccagtccgctgtcccttcctaacagaggcacctgttcctggtggcacagttcctggtggcattcagagtgccagggaaagcaacaggaggaggaagaggggagcaggtctgagaagcagaagcgcatctggtggtgaccatcgctaggaagagaaggaggcaaggatcggnccaggagaaatgatgtccaaagtcaaacnagtcatacaagatctcactgtggagaaagacaaaggnggggaggcctccagacncagtgaagaanaatcccaccttctggaaagaggnanagaccaagaatcctggaggttatgtcaaanggaaagtcaggccgacttg

SEQ ID NO: 705 - DNA, 253 bp, Homo sapiens
tttgagccctgaggcctggtgaacccatcttcaagcttttcagcggagaagacgtactgtatgagggggactccattgtgtaccctgtgttcattaatgaggcaagccagtaaagaacatccctccatggcctctgcatcagctcctgctccctgacctgcttgagttccagtcctgacttcctttggtgatgaacagcagcatggaagtgtaagccgaataaaccctttcctccccaacttaaaaaaaaaaa

SEQ ID NO: 706 - DNA, 379 bp, Homo sapiens
  misc_feature (1)...(379): n = A,T,C or G
tgagtggcagcccagcagcagcagcagcagcagtgggagcaggaacagcagtaacaacagcaacagcagcacagccgcctcagagctttggctcctgagccccctgtgggctgaaggcattgcaggtagcccatggtctcagaagaagtgtgcagatgggattaccgtccacgtggagatatggaagaggaccagggattggcactgtgaccatggtcagctgggggcgcttcatctgcctggtcttggtcaccatggcaaccttgtccctggcccggccctccttcagtttagttgaggataccactttagaaccagaagatgccatctcatntggagatgattgaggacgacacagatagctccgaagacgttgtca

SEQ ID NO: 707 - DNA, 303 bp, Homo sapiens
  misc_feature (1)...(303): n = A,T,C or G
tatgctagtcactctcctaactgtaaatcaacactaagagcactagaaggttaaaggtcaaggagactctcacaaaggatccaggaatctccagattgatttccagaatggttgaccagtttgcaattccacaagcaatggaggagtggtcctctttctccacatcctggccagcaagtgctngtcacctgagtttttgatcttanccattctgattggnggaaggtggaatctcantgttgctttgatttatatttttctngatcactaaagactttgaacatttcttttgaaaaaaaaaaa

SEQ ID NO: 708 - DNA, 376 bp, Homo sapiens
  misc_feature (1)...(376): n = A,T,C or G
gactgagtaccgttccccagctgaagagttctgaatccacgccggatccttctcaacagtctgttttacgggaacctttattaaccactccttccccgtgatgcagttctgaatcctccctgtagcagggggtcttcgctcgtgcctgaaagatgtttcttgtcccgggtctcagcaccacttgttgcacgcgcccccaactcgccagcaagaacgacgctgctacaggatccttctgcacacgtttattcagtcctatttctttcttgtntatatctcccttgtttatatctcccctgnttatatcttccttgtttatatctcccaataataacaatcctctctcgaataataatcctccctctaagaaaagaaa

SEQ ID NO: 709 - DNA, 440 bp, Homo sapiens
  misc_feature (1)...(440): n = A,T,C or G
tatctcacaccacagctatgcaatacctaggaanangatactgatcgcctggaactanggaaacaagtgcganagntnngctnanngtaaatntacttangnctanagganccctcgggcgagctatacctggactccttggtggngatgacagacgacaggctgattggntgctagccaggaccacncttctccttgtgctggttctnctccaaactgcnacttaatgcacctgcaatgaaaanggccccacaccagtaaccagatgctgcantgagccgntttattttgctattacaactgggcanatnagacaattttaagccangtggnggngatntatgtctttgattctagcactcaggaggcagaggcaggtggatctattgagttagaggccagcctggtctatagagtgagttccaggacagtcctgtgtt

SEQ ID NO: 710 - DNA, 428 bp, Homo sapiens
  misc_feature (1)...(428): n = A,T,C or G
ttgctaggggtggagcttcctgctcattcgttctaccgcgcnnactggtggancctgaggagccacacacgtncacctttgtnctggannaganattattcangagggaatcgggncccctcccccttccttnataannagttgncctnncannngantnnganccttgatcagantactnacanaaagaaagactgntngnnnaaaaatggctgttaccttgagaagaattttggatgcccaggctggtgaanaagggactgacantggaccatcttcctagaactcccanctaaatacttnaggacacatcttntggaatgnatttnacttttgagggggagggagaaattgacttattgattcctaaattctttgcaggatcagaangncngcctttgttacagagtnaacacagaaccaacact

SEQ ID NO: 711 - DNA, 325 bp, Homo sapiens
  misc_feature (1)...(325): n = A,T,C or G
gactgagattgacaattgccttttttgcactctctgggctggatatgctggactccttggatgtggtgaacaaagacgatataatagagtggatctactccctgcaggttcttcccacagaagacagtgaactanataatnnggtgcttgctcanagnnatnnattgnatggatnncacnaccnnnaatggnggagccanagaaagnagccaangngctgaaggngtctgcntccctataggtcnaacaganagtgcnaactaaccantacccncanagctngtgtatctagctgnatatgtancaaangatggcctagtcggcc

SEQ ID NO: 712 - DNA, 391 bp, Homo sapiens
  misc_feature (1)...(391): n = A,T,C or G
agactgccctttggtattcaaacgggagccgctttggactgactggctgccttcctcctcctccccctcctcccccttctgcttcagatttatttattatatgtaagtacactgtagcagttgtaggacacactanacgagggcaccagatctcattgtgggnggttgagtacnnccnngcatngcngntagggncgatnggnactcagggataanannnntgactagctcttggctntnanccggaanatacantatgtgcnggctantgcacttcatatattaaggcaatgaatgatccnntcatggnacgacagtctgccctccctcctttttgagccattttccctctttcaccatatactcaataaaataagtaaatgaaaaaaaa

SEQ ID NO: 713 - DNA, 294 bp, Homo sapiens
  misc_feature (1)...(294): n = A,T,C or G
gactgaggataacgcgtatggagtgaaactccccnctgcagggttgcctgttagcttcctgaggtctcagcggagatatggactgtgggagtgacacttcanggactgggaggctgtggccttgctggcagaagtgcatcacagggacaggcccagtagtttctctccagtctcctctccagcactacttccgtcttcctgccacaatgttccctgaaatgaagataatgaactgaaccttagaaattgtaagccagccccaattaaatgtttccatttatttaaaaaaaaaaa

SEQ ID NO: 714 - DNA, 432 bp, Homo sapiens
  misc_feature (1)...(432): n = A,T,C or G
actgaggtgatgtacaactttttgacctccagaaaagctcacagcaaacccacagtttctataacacaaacccaagatggaagtcctgtctactgtctcgagtttaacagccagcagacacagctcttagccgctggtgatgctaagggcatggtcaaagtgtggcagctgagcacagccttnacagaacaagggccccgggaggtggaggacttggatcagntanaancagaaatcactacctgagggctggtgagatggctcagcgggtaagagcactgactactcttctgaaggtcctgagttcaaatcccagcaaccacatggtggctcacaaccaaccgtaatgagatctgatgccctcttctggtgtgnttgaagacagctacagtgtacttacatataataaataaatctttttaaaaaaaaaaa

SEQ ID NO: 715 - DNA, 462 bp, Homo sapiens
  misc_feature (1)...(462): n = A,T,C or G
cctttattaaccgctccttnccangatgcagntntgaatcctccctgtaannataggggtctttgctcgtgcctgaagatgttncttgtcccgggtttcngcaccacttnttgcgcgcgctcgactggccangaagaacgacgcttcaacaggatccttntgcncactgtttattgngagagcttnattgtanaggcnaaaagactttttgcccagagctggcgctgcttttataggcctaggagaggcgtgnctcataccctgattggntatgcactaagcctcatttgcatgttcctcatctgattggctactctctctcagtacctcacagagcctcattatcatatcncattngnatgtctcacatccaattggctactntattagnaccttacagaanctgattatcatgcctgggccaagcagtgtttttgcaaaanncttttcctgcatatgtat

SEQ ID NO: 716 - DNA, 335 bp, Homo sapiens
  misc_feature (1)...(335): n = A,T,C or G
aagagcccactcccacccgctcaacacaaccctccacatcagcatgttcgaagtggtccaagagcactccaacagggagtctgacttgttctttttggatcttcagacagctccgatctggggacgagggctggctggtgctggacatcacagcagccagtgaccgatggctgctgaaccatcacaaggacctgggactccgnctctatgtggaaaccgcggatgggagggagatgtagtctcccctcccccagcctgnaacctngcttgctcggggnggagcttnctgctnattcgttctgncacgcccactgctggaacctgaggagccacac

SEQ ID NO: 717 - DNA, 262 bp, Homo sapiens
agatgggccgagagctggggggtgcgcccagacgcctcgccagccaccagtctgagttggtctttcgaagcagtaggaacctgtcaccttcagccagagacacctgccggccatctgccccagtgtcctgagttcaaatcccagcaaccacatgatgactcacaaccacctgtaatgagatctgatgcactcttctggcacatctgaagacagctacaatgtacttacatataataaatagataaatattgaaaaaaaaaaa

SEQ ID NO: 718 - DNA, 161 bp, Homo sapiens
tggcccaaccaaagtcttttggataaagcaccacaatggacaatgtaaggaaggcagccaaacgcttacgcttcccaaggcacagatctttcccagcatgggaaagatcctccctccctccctccctccctccctccttccaccatacactttattaaaat

SEQ ID NO: 719 - DNA, 526 bp, Homo sapiens
  misc_feature (1)...(526): n = A,T,C or G
gactgagtggataatcttcctgtcctacacctgaccaaggcatcccctaaaagccccagggaggctggaccatggtacaagaactgccttcatccatcaccgtgagcaagtgtggaagagatgcatcaatgtttggnnagncatagcccacttntggcttaccataggccatgngctaccgancctgnttngggcatctnttgaatggctgcttattgcagtntgtgccttcatattnccacaaancatattatcgnnatccatttttatngtaaaactcaagggtgtaccanaaacctaatttatccctaatagctnggcttgattttacaaacctgctntcagcaccgacctcatttgcttttatctgaagctcaggaaagttaggaaaaggntgaattgattcgttaatatgtaggacatgtanccgggcgtggtggctcacgcctttaatcccagcactccanaggcagaggcggncggattnctgagttcnaggccagcctggtctacagagtgagttcca

SEQ ID NO: 720 - DNA, 311 bp, Homo sapiens
  misc_feature (1)...(311): n = A,T,C or G
gcccaagtggatgcaggancccgggcagccagaangggttggtatctcctggaancatgaatnacataaaggtgtgagcngccatncnggncccagganctacagccaggtcctctgaaagagcngacnntgctnttaacccccaagccatntntccagnctgagagtgctgnnntcttatcatganaagacaaacagcagtggagttggcaagctgcctcagtgggtaaaggtacttgctgccaaggcttgcagcctgatttcgattcccagaacccagagaatagaagtcgaaaaccaaaagaaaaaaa

SEQ ID NO: 721 - DNA, 212 bp, Homo sapiens
  misc_feature (1)...(212): n = A,T,C or G
tgaggtgacccgaatggagctgtggcccggggccnggacggcgctgctgctgctgctgctcctgctgctgnccaccctgtggttctgcagctccagtgccaagtatttctttaagatggccttctacaacggctggatcctcttcctggcgatcctcgcaatccccgtgtgtgctgtgcgagggcgcaatgtcgagaacatgaaaaaaaaaa

SEQ ID NO: 722 - DNA, 233 bp, Homo sapiens
  misc_feature (1)...(233): n = A,T,C or G
tgaggcattttgtgaaagaaggaagatcctgtctgctgcatggataatggactggaacacagaaagaccatgcagggttcggctgtagaaggccggtatctccanaggccagaagacaccatcagatctcctgngactggagttatagaggttgtgagctgccatgttgaaccaancaggtnactgagggacacaggcatgtggatggaaaccctgctgggagaaaaaaaaaa

SEQ ID NO: 723 - DNA, 225 bp, Homo sapiens
agagttctgaatccacgccagatccttctcaacagtctgttttacgggaacactttattaaccgctccttcccagtgatgcagttctgaatcctccctgtagcagggggtcttcgctcatgcctgaagatgtttcttgtcccgggtttcggcaccacttcttgcgcgcgcccaactggccaggaagaacgacgctgcaacaggatccttctgcacaaaaaaaaaa

SEQ ID NO: 724 - DNA, 305 bp, Homo sapiens
aagggcattcagatctgggagaagtggccccagaagtaaaaccttcagacagccaaacatctgtggcaattgcagatttggaatggagagaaatggaaggagatgactgcgggttccattatggagatggtacaaacgaggctcaggacaatgacttccccacaggtcctgagttcagaaatcctggcaaccacatggtggctcacaaccatccttaatgagatctgacgccctcttctggtgcatctgaagacagctacagtgtacttagatataatagtaaataaattatttaaaaaaaaaaa

SEQ ID NO: 725 - DNA, 273 bp, Homo sapiens
  misc_feature (1)...(273): n = A,T,C or G
actgagtgcatggagctgtttgagaagacagaggatgtgcccttgttggaggagatgtgtccctgggggaaggtcttgaaacttcaaatgcccactcactccattctcagcacctctcttcctcatgtctatgaatcaggatgggaagttctcagctactgctctagcatcatacctgcctgccagatgccgtgctccctgccatggatggtcatgaactcaccctttaaaactgnaagccctcaataaagtctttcttctacaaaaaaaaaa

SEQ ID NO: 726 - DNA, 231 bp, Homo sapiens
  misc_feature (1)...(231): n = A,T,C or G
tgcaggctggttagaatgaacaggacacgcccacacccacagtactgtaccttnatattctcgccatccagaaggtctatgaagccatcatcctcatcggacaaagtggcttttacagggtttcttcctggagccgtgactgtcctggacctcagtctgtacaccatgctgcccttgnccacctgcctgtctcccaagtgctgggattaaagatgtgcaacccccacaaat

SEQ ID NO: 727 - DNA, 231 bp, Homo sapiens
agcatgaaatcgggcagcgatgatgtgacgaacgcagggtattctgcagccaattctaattcaattttcgccaactccacgggtttctctgtagccctggctgtcctggaactcactttgtagaccaggctggccttgaactcagaaatctgcctgcctctgcctcccgagtgctgggattaaaggcgtgcgccatcacgccagcaaataaataaatcttaaaaaaaaaaa

SEQ ID NO: 728 - DNA, 460 bp, Homo sapiens
  misc_feature (1)...(460): n = A,T,C or G
tcggctttgggatgggttgcgacggaggcaccatccccaanaggcacgagctggtgaaggggccgaanaaggtcgagaaggaggccagaagaaagcatcggacccccgggagctggagctacaggtttttgtgagccattaatcttggctgttagaaccaaattcggatcctttggaagagcagtacacaggcttaaccacggagccatctntccagcctgaactttgtgtattaaagtctccccaaaccattcccccttgtgaagtcacacccttnttaaactatatnagctcttagcactctgaattggtggttgagcccagctgatggtcacgtgactgcaagctcctcctggtgaactctgtgcactgnttttcttncagaactagcacagtttctgccacagtgaatatttttgaataaatgcgtgggcnttctgtaaatcttacaaaaaaaaaa

SEQ ID NO: 729 - DNA, 100 bp, Homo sapiens
cctcattggctctagtggctcctccccgagccggaccagcccggagtccctctacagtgacagctccaatggcagcttccagtccctgactcaaggttgt

SEQ ID NO: 730 - DNA, 266 bp, Homo sapiens
  misc_feature (1)...(266): n = A,T,C or G
tattgattctgcctcccaacaagacaanctgaggaagtgatgagccacgnagccgnngacccttanagttttagatgngcggatcccttcatgtatactttacagaaaaccatgntaagccgggcgtggtggcgcacgcctttagncccancactctggaggcagaggcaggcggatttctacaaagtgaggccagnctggtctacaaagngagttccaggacagccccagggctatacagagaaaccctgtctcaaaaaaaaaaa

SEQ ID NO: 731 - DNA, 520 bp, Homo sapiens
  misc_feature (1)...(520): n = A,T,C or G
tgacgggaatttgaacccccatggccccgatgacagcatcattgtacttgatgatgacgatgaagatgaagctggtgntcaaccagggccctccaacctaccccccaatcctgcctcaacaggacctggtcctggcctgtctcaacaggccactggtctctccgagccccgtgtggatggagggagcagtaactccggtagtaggaagtgctacaagttggataatgagaagctctttgaagaggtaagcttttgagataaaagggtcgccctttgtggcccatgctggccttgaactcacagagcttttacttgcctcagcctcctgacagctaggattaaaaatgtgaaccactgggcaggagagatggttcagcggttaagagcattgagcatccagaagtcctgagttcaattaccaccaaccacatgatggcgtggctcacagccgtctgtaataggatcttgatgccctcttctggtgtatctgaagacagctacagtgtactcatatatagaa

SEQ ID NO: 732 - DNA, 346 bp, Homo sapiens
caggcggtgctaaattttgtctgttacagcctcggccattagaagctggggcaagcttttctgcctacttaactctgattttatttatttgttatatgtaagtacactgtagctgtcttcagacactccagaagagggagtcagatctcattacagatggttgtgagccaccatgtggttgctggggatttgaactctggaccttcggaagaacagtcgggtgctcttacccactgagccatctcaccagccccatatatgtcatttttctgttcccacattctctgtaagattattgtcataagttaaaatctgaattaaagcatttgaatgtcaaaaaaaaaaa

SEQ ID NO: 733 - DNA, 487 bp, Homo sapiens
  misc_feature (1)...(487): n = A,T,C or G
ctgaggttgagaacatttccaagctctgactacaacattaaacctcagaatggaagagatgggaagtcgcatcgaggacttacagagaaacgtggatgacctcatgactcaggccgggatcgagaattctatcaaagaaccagcgacctgaanatgttaaacngagtcacgtgggattgctaaaacaaaaactacaccatacgtctgagtaataataatctatgcagtatgaattntgatgttcatttaaattttttttggacacttaaaattaaacccagggcctaaactataggcaagtggctaccaacgagctataccctaacccactgaaaactaaaattcactttaacaaatgaagaacaaagctgggccataatggcacatgccttcaaccccagcacttgggtggcagaggcatgcagccagtctggcctacagagggagttccaggacagccagggctacacagagaaaccctgtcaaa

SEQ ID NO: 734 - DNA, 150 bp, Homo sapiens
  misc_feature (1)...(150): n = A,T,C or G
gcacctctggaggtggaaggaagaggatcangaagttcaaggccattctcagctatgttggcagttcaagaccagccggagcttcatgaaaccctgttttaaaattaatgaaataaaataataaaataaaacaagatttaaaaaaaaaaa

SEQ ID NO: 735 - DNA, 100 bp, Homo sapiens
  misc_feature (1)...(100): n = A,T,C or G
ttccaaagtctgaccaatcattgcaccagtcgagctgacanccagtgctggctgtttgcctgtaccactattaaaaaataattcagtttaaaaaaaaaaa

SEQ ID NO: 736 - DNA, 394 bp, Homo sapiens
aacagcggacacccagagagctaaatgtctcctaccggctaagacaaggaaacccactcagatcgacctctcgtggatcaaacagactctatccaggtaagtacacctgccaatcactaagttcctgtaggaggctgtagcctcccctttaggctgcccgagctgcaccttaaagatggcgcctgccagatgcagagctggtggtgtaaacaagtccatattcggtggagacgtgcccctgccgccctgattggctgaagccatgtacctggtgaggtgacgtggcctgccgtgagtggatgggggctgagagtatataagagtgagaggcccggggttcgagggagatgaagactgaaaatggctgaataaactgctgatagaagaaaaaaaa

SEQ ID NO: 737 - DNA, 321 bp, Homo sapiens
  misc_feature (1)...(321): n = A,T,C or G
aacatcttacctccaagaactgcttcagacgtatgaaagagcccatctggnctgagctngtgatggcttcaattctatntagngganagacngagagacttgtgantacntcctntgaggaatctcaacactccatcangngangctcactggttaacancaccgactgntcttccaaaggccctnagttcaaatcccagcaaccacgnggggggctcacaaccatncgtaatgagatntgacnccctcttntggngtntttgaagacagcgacagtgtnctcactataataataataaataagtcttaaaaaaacgaaaa

SEQ ID NO: 738 - DNA, 247 bp, Homo sapiens
  misc_feature (1)...(247): n = A,T,C or G
tcacctgtaggctgtcttcacaacacntccagaacagggagtcanatctcattacngatggntgtgagccaccatgtggttgctgggatttgaactctggaccttcngaagaacagtcgggtgctcttacccactgagccatctcaccagccccatatatgtcatttttctgttcccacattctctgtaagattattgtcataagttaaaanggggaattaaagcatttgaatgtcaaaaaaaaaaa

SEQ ID NO: 739 - DNA, 400 bp, Homo sapiens
  misc_feature (1)...(400): n = A,T,C or G
gctaaggcagttacattcggagttccgcggactcttcagaggctgtaaaaatgccggagtcacgaaagcctgcaaagagctgttgcttgccttgctgctgctgctgctactgccgtccctgcccgtgctgcagctgctactcctgctgctgctgctgctgcttgttgctgattgttgcggttgctggttgctgtttactgtttgctgccggctggagngctggattgctgattgccagtcggcgaaatcctggcgatgaagatccaacttgccccaagaaacaagacgaccctaagaagtagtctaatgatttcaatacgccctttccccctctgacctttctctcttaccttatgctgggggattggaagggtggcanaaaaaagaacccaataaagta

SEQ ID NO: 740 - DNA, 259 bp, Homo sapiens
aactgaggatcggctcctggagcaggacagcctctgtggcctcactggcgctgctttggtttctgggacttccgtggacctggagcgcggcggcggcgttctgtgtgtacagtgggtggcggcggctggcgctttctgcgtatcgtctgcaagacggcgaggcgagacctctttggcctcgaactcagaaatcctcctgactctgcctctgcttcccaagtgctgggattaaagacgtgcgccaccaccaaaaaaaaaa

SEQ ID NO: 741 - DNA, 205 bp, Homo sapiens
  misc_feature (1)...(205): n = A,T,C or G
catgatggttgtgagccaccatgtggttgctgggatttgaactctggaccttcggaagagcagttgggtgctcttaccactgagccatctcaccagcccctcaacagatttctgatcngtgagaaaagactggaacatagatgctttctctcctacggcctgaccttcagggtgacaaccatctctgaactgaccgggaaaaaaa

SEQ ID NO: 742 - DNA, 275 bp, Homo sapiens
agcacgacagagtcacctgggagaaagacatctggagcacatcgatttgaggtgggaagatcagcccactgtgggtggcaccatcctgtaggctgggaaactgcattgtgttaaatgaagaaaggatctgagcagcaatgcgctcatcgttgtttcctgattgtgggcaaccagctgctccaagctcctgctactctgacgacttccccactgtgatggattctaaccttgaaccatgaaccagaataaaccctttctcccttcaaaaaaaaaaa

SEQ ID NO: 743 - DNA, 182 bp, Homo sapiens
aacgacaggaaaagacctgtggtatatgaaactttgttgacaagagaggatccagagactttaaaagcaaaactctgctgggcatggtgactcctgtctgtaattccagcacttggcagcccaaggcagatggaggaggatcagagttcagaaagtgaagcaaattaatggaaaaaaaaaaa

SEQ ID NO: 744 - DNA, 215 bp, Homo sapiens
  misc_feature (1)...(215): n = A,T,C or G
tgtcttgcatcgtggttatagaccaagggaataaaacaagatcttataaataggctgcaggcctatcttgaagaccatgcagaagaagaagcanatgaagangatgtactgggagatganactgaggaagaagaaccanngcccatanaactgcctgttaaagaggaagancctcctgaanaggctgttgatatggcatcggaaaagaaggtggt

SEQ ID NO: 745 - DNA, 315 bp, Homo sapiens
  misc_feature (1)...(315): n = A,T,C or G
catggcttcctgtgcgtgcttggcaactngacagnaatctanagtcatctgngaagagggaacctnaattganaaaatgcctccaccacaccggactaagngggcnagancatctacctgctgctgctgctggcgacggcancancancagcnttgtttgctatcatcagagcccaccttctttggccttncaatgtgagctaaagaccagnagntctccagaaagtgtntncaagnttgggggncnagnctggggntggtggngngcnnaagctggtgggggggggnggntggggggggggggggggggtgcgg

SEQ ID NO: 746 - DNA, 384 bp, Homo sapiens
  misc_feature (1)...(384): n = A,T,C or G
aaatggcaattcagcaagctgataaactgnangaanaaacacactgatcttcantgtcgcgnaggttctcaaggccattggtttacagagaactggcaagcacagaagtaaagtggaaaatggctttacaagttatgtttggccttaaattttttctagtgttagaagcccttttgttccttttcacatgttatatagtgcttaagatagggnngaaaattctagaggaaattcaggacagtctatcagaagtaaagcggggagagagagtaggagcaaggagaaacggtaagtatacaggcctttccaagggtcttgaacccgaggaaaagttaaggtcaggtaggaatacctggggagagattagaaggaagaaaaagaaaa

SEQ ID NO: 747 - DNA, 100 bp, Homo sapiens
  misc_feature (1)...(100): n = A,T,C or G
gggaaaaggggacggttttctgaagttatgaagatgcagagnctgagagatggganttactatgcgtgcanacaaatgaagcagcactttgaaagtattg

SEQ ID NO: 748 - DNA, 199 bp, Homo sapiens
  misc_feature (1)...(199): n = A,T,C or G
gactgaggatgtcctaacttcaggnatggaaggaaggaaacatgatgccatattgaagaggttttgtctttgtttcaatgggagaagaagagctacggataccatcaaattaataaagattagatttggccaggggagacctcctgaaaatcttggctacagacatgaaggaaaaaattcaagaagaccaaaaaaaaaa

SEQ ID NO: 749 - DNA, 234 bp, Homo sapiens
  misc_feature (1)...(234): n = A,T,C or G
agacacccgggcgggcaccaaggctggattccatcacggcatggaatgagcctcaccaaggcttttgaaaatgtccttccgggctggagagatggctcagtggttaagataaacaccaacaacttttccagaggtcctgagttcaaatcccagtaaccacatggtggctcacaaccatctgcaatagggtctgatgccttcttntggtgtgtntgaagagagcaatggtgtact

SEQ ID NO: 750 - DNA, 214 bp, Homo sapiens
ctcctgtctgctgatggataatggactggaacacagaaagaccatgcagggttcggctgtagaaggccggtatctccagaggccagaagacaccatcagatctcctgggactggagttatagaggttgtgagctgccatgttgaaccaagcaggtcactgagggacacaggcatgtggatggaaaccctgctgggagaaaaaagaaactggtga

SEQ ID NO: 751 - DNA, 100 bp, Homo sapiens
aagactccctcacagttgtttttgaaaataattggcaaccagaacgccaggttccgtttaatgaagtgcgattaccaccaccacctgatataaaaaaaaa

SEQ ID NO: 752 - DNA, 334 bp, Homo sapiens
gcgggaattgacaggaggactacgccgcaagggataggcccagaatagcaaccaggaaacaaaatctcatcatggccaatgtccaccaggaaaacgaagagatggagcagcccctgcagaatggacaggaagaccgccctgtgggaggaggtgagggccaccagcctgctgcaaacaacaacaacaacaaccacaaccataaccacaaccaccaccgaagaggccaggctcgccgacttgcccctaacttccgatgggccattcccaacaggcagatgaatgacgggttgggtggagatgggagatgatatggaaatgttcatggaggagatga

SEQ ID NO: 753 - DNA, 127 bp, Homo sapiens
  misc_feature (1)...(127): n = A,T,C or G
aatggtgacgaggctccctaaagcagcctcgaccatccacagacagcctcacgtttttctcctactttttccttatgcttttaaatggcagactcgccgggcgtggnggcgcacgcctttaatccca

SEQ ID NO: 754 - DNA, 199 bp, Homo sapiens
  misc_feature (1)...(199): n = A,T,C or G
ggcaaacttcatgtgcangctgatacacataggcctctgaggaaatttgtantatgtcctggaagctctaaagaaaagcaagagtgccgggcagnggtggaggacacctttaatcccagcacttgggaggaagaagcaggnngatttctgngttcaagaccagnctgggctacaagagtgagtccaggacagccagtct

SEQ ID NO: 755 - DNA, 237 bp, Homo sapiens
  misc_feature (1)...(237): n = A,T,C or G
ccttcaagtctgctatggaattgaaagtgacctggagcttccggtcctttctacctccccggtgctgggatggcagaagtgtgtccgcctgcgcattantcatggttaggaataaaacccagggcttcaagcatgcttggcagatgttctgccaactgagacacanccccagtccccaaaccacatagttntgaaatacaggtcacattnaaaaataaatcaacctgggatggacgg

SEQ ID NO: 756 - DNA, 295 bp, Homo sapiens
  misc_feature (1)...(295): n = A,T,C or G
ccctccaagagctgagatcacaagaatgtaccaccataagcggttttgtgtgtgtgttggagagatggttcanaacttaagagcatatgttggtcttctagaggataggaattcatttcccagaacccaagccaggtggctcacaaccacatgtaactctaaccccccaagatccagtatctcggcctcttcagacacctttactcacatgcacatatcaacacttaaatgcacataatttaatttatttccaggaagaaaaagttcctaaaaatcaagacacctgctcaccaga

SEQ ID NO: 757 - DNA, 146 bp, Homo sapiens
  misc_feature (1)...(146): n = A,T,C or G
agtgtgtatcatgcggttattgtcatctttttggagttttttgcttggggactactgacagcacccacattggtgaacaatgttctaggacagccagggagacacagagaaaccctatcttgnagaaaggaaggaaggaagaaaaa

SEQ ID NO: 758 - DNA, 193 bp, Homo sapiens
  misc_feature (1)...(193): n = A,T,C or G
gactgagagttgtgctgaagacaacagacacctccatgacaacccaaagtatcacagaggaaatgaaaagctgtggactcattcanagttaattaagattaggtatgaccatggaagacttgtgtatgaccatggaagacttctagagaatcttgactggtgatgtggaaaaagagacccagaagaacaaaaa

SEQ ID NO: 759 - DNA, 484 bp, Homo sapiens
  misc_feature (1)...(484): n = A,T,C or G
ccattcttgcccaggagagagcgaggtcctggacctggagagtgagctgtacctgggcggtctncccgaggggggacgagtggacctgccactgccccctgaggtgaggacagctgctctccgggctggctacgtgggctgtgtgagagacctcttcatcgatggacggagtcanagatctccggggcctggctgaggcccagggggctgtgggcgttgctcctttctgctcccgggagaccctgaagcagtgtgcgtcggccccttgtngaaacgggggcatctgtcgagagggctggaaccggttcgtctgtgactgcatcggaaccggctttctgggtcgggtctgcgagagagaggccacggtcttaagctatgacggntccatgtacatgaagatcatgctgcccactgcgatgcacacggaagcagaggatgngnccttacgcttcatgtntnanagggcatatggactcatgatggc

SEQ ID NO: 760 - DNA, 167 bp, Homo sapiens
  misc_feature (1)...(167): n = A,T,C or G
agatgtggtggtagtaggcggttatgaaactatctgcaaggaccgtctgatgggccagtgtggcccagcgtctnaactaccnanntggcaaaancattggntccttgctacgctctcactatgaacgcattgtttatncctatgaaatgtaccagtctgggagccaa

SEQ ID NO: 761 - DNA, 298 bp, Homo sapiens
  misc_feature (1)...(298): n = A,T,C or G
actgacaacagcccttctggggacagtgactgctacatgaactacaggagtgtcgaccaggactctcagcccgtctattgcaacctggagtccctggggcgatgaggagagtgtggtctcctggcgctgaaccagcctccaacagcccccaggatccagcacgctcaacatcacagggggtagaggacaccccaccccacccagagcagaaggagggtgagaaacaaccctccggtcagngngcatgcatgtgatgctcaataaaagctctgggagcagctgactctaaaaaaaaaaa

SEQ ID NO: 762 - DNA, 383 bp, Homo sapiens
  misc_feature (1)...(383): n = A,T,C or G
gactgagctttttcctgcaatacagtggntacagtttgctgtggctactctgagtgttataggctccagntcactcctcacctacatcgcgttccagagcccacagaagtctgcagagataaagccactcttgtatctgagcttctctgacctgctcctgggaatttgctggctcgtaaaggcacttctctatggaactgcagcagcccacaaggacagcatctgctataacctacagaccgtgggggagnttnttctacnttgnctcactcctctanacngcannctacantgnggcgcnaggttntnanangnngangaagacagagcngnctnagtcgtagatggagcacttgtnganccaggtgacagattatgttatg

SEQ ID NO: 763 - DNA, 126 bp, Homo sapiens
  misc_feature (1)...(126): n = A,T,C or G
ggtgatgccgggaggccccccagccctcaatcagccaatcctcatccccttcaacatggngggacagctaggtggtcagcaaggcctggncctcacactgcccaccgngaatctcacaaacatcca

SEQ ID NO: 764 - DNA, 160 bp, Homo sapiens
  misc_feature (1)...(160): n = A,T,C or G
aagtggcaaggagagactcaggagttttgccccaatgngngggnggtgctggttggctgtaagctggacatgcggactgacctggccacactgagggagctanccaagcagagactcatccctgncacacatgagcagggnactgggctggccaagcaag

SEQ ID NO: 765 - DNA, 368 bp, Homo sapiens
  misc_feature (1)...(368): n = A,T,C or G
tgtagccactgaggaccagcaaaaacacctgtccaaggcagcacagctgggaccagaancaagtccccaattgtctactctnctgtgcccatctgcttctgctcagtcccctagaccttggaacagagggtcccgcactcacacaggccatgattgaagctgaagcgaagagattcctgagacctgctccaccagcagtcagaagactccacccgagagacgggccccaggcccgntccgacctttttaactggatcagacccgggccctgcacttcnnattgaaggatgaagactgctgnaggtcaccgccctgcggaangctgagncctgtgatgtgtgngaaangtatcctacgtggcagagaag

SEQ ID NO: 766 - DNA, 195 bp, Homo sapiens
  misc_feature (1)...(195): n = A,T,C or G
gcgacgcacactgctcancanctatgaggtgttccagttactaacggatctcaaagagcagccggagggngagtgggaagaaacaagcatacccctctgcaaccaaaactaaaaccgccntcaccttatgagacccttaaagnccttatcaaaacccccctcgtgggnncccagagnccagcggatttgtcccaa

SEQ ID NO: 767 - DNA, 232 bp, Homo sapiens
  misc_feature (1)...(232): n = A,T,C or G
gaactgatttgggaaggncaatgtgatcctatcagtacataaggaagccccctgctcatgtcttccacagtggccngnggtgggnntgccaacatcttggattacaagagcctccgtgagatcgtggtgaaccaccagtattcanctggctgttttcactacaagtgccctgctgangtgncggnggnanaagncaaaatnnnntccttaacnagatatgtgaaaataactg

SEQ ID NO: 768 - DNA, 177 bp, Homo sapiens
  misc_feature (1)...(177): n = A,T,C or G
ccgctgatagagcagcanaagaatatncagangnccaacttgatgantcnngcaaggctnacaggcctcagagcaagggatgacggggngnctgatctgctaaatgaggcaangcaganactcagtnggggtggtaaaagatacnaccccncnaccaagngctgctggatgggctgg

SEQ ID NO: 769 - DNA, 203 bp, Homo sapiens
  misc_feature (1)...(203): n = A,T,C or G
gactgaggcataatagtggatccttgatgtggaagacgtccttaccagctttgacaacacaggaaatgtttgnatgtnctntgctcagnatgaantatatccactagctttatcaaaccaaaaaaatatataaaaggancttnntntgtggnacccagggggtggncttgacatgcncggcaaggantcatagcttgttattt

SEQ ID NO: 770 - DNA, 248 bp, Homo sapiens
  misc_feature (1)...(248): n = A,T,C or G
aactgaggtggtgggncttctcttgcctaaccagancgctggcatccactgtcttctggcagtgnctgaaccagagccataangnctgnggnaactatgcaaaccgcattgctaccaagccttcacctgcatccaagttcatccagggctacctggncgctgtcatcagtgctgtttccattgctatngggncaatatcctctccctgacngagcagggggtccttacnccaaaataccatggggggg

SEQ ID NO: 771 - DNA, 320 bp, Homo sapiens
  misc_feature (1)...(320): n = A,T,C or G
ttacaggagaattagaatatgctacgaaaatctccaggttttcaaatgtctatcatctttccattcatatttcaaaaaactttggagcagatacgacgaagatcttttatattggcctgcggggagagtggactgagcttcgccggcatgaggngggnntctgcanctatgaagcgtnagccaacccagcagaccaccgggtgcnttnaggtcaccccncacacacactttnntttcttaagggccagccggggctccctnanatgcgctgttagngaaaatgngcgaccacctgctggggaaggacagaggatgctcca

SEQ ID NO: 772 - DNA, 411 bp, Homo sapiens
  misc_feature (1)...(411): n = A,T,C or G
actgaggatccaaactactggatacaggtgcatcgcttggagcatggagatggagggattctagacctggatgacatcctntgtgacgttgctgatgacaaagacagaatacacctgccagatgattaaaatgngcctaatttantcagcatgggtacttgtncaccagagatantttnaagctaatgtcangngacntcttcntctatcctgcanaaaatgctaaaancattgaacagagcngggnnncactttcaaaaaaatgtttgnaagctnccctnggcttnccccccaagnggatatttaaaancccnccccccccccnttttcttttccttttngttntgcaanttaatnntgatantccgttctgnaaatggnaccatggggccttaaaatttttaataaaac

SEQ ID NO: 773 - DNA, 238 bp, Homo sapiens
  misc_feature (1)...(238): n = A,T,C or G
ccactggtcatatgaaggtgnnattgnaactgcacatggattgtcactcctttcaccccaggacctccgcacctggcatgaagacttgtcctgggggagggaaagagcttttcctgagcttcacccactagctcctctttttctccctacacacacagaccctggggcttacacaagtggctgctagaccctgctgtaatcattaaatcccacatctcctgattcagcaaaaaaaaaa

SEQ ID NO: 774 - DNA, 137 bp, Homo sapiens
  misc_feature (1)...(137): n = A,T,C or G
agagaccgcacaggaaaagaagctaccgcttggncaanctctaccttgaacaactcaggcngcaagaggagganaaggctgaagcccgtgcattcnaggaggatcaggnggccgngcgcttgaaggaggatgtgctg

SEQ ID NO: 775 - DNA, 425 bp, Homo sapiens
  misc_feature (1)...(425): n = A,T,C or G
tctctcctttattgcctactagtnntttaaattggacttttaatatcctaccagcgtgctcttcagacacacatggtgcattgctgccattcccgggattgcatctttgagacacacactcttaggagccttcagcaaacaaagaggccacctcccggtacggctaccggggagggagngatcctgaccgccctctagccttggccagctctggatatgaatcctaccatggaaccgagantggagtcctgtctggcccaggtgctgcaagaaggatgtgggaaancaggttgcnggttgaccaggaactcatagactatttctcagacagacnagaaagtccggctgaccttgagcacnaccaanaccctngttnggataagctttgagnatgggactccgntancttcttggggtgaactcta

SEQ ID NO: 776 - DNA, 196 bp, Homo sapiens
gagaagctcgaagcggtctgggggcctctccgctacagtctgcccgatccctgccaggcaacgccccttgcctcaagcacttcccgcttgacctgcgcacgtctatggatggcaaatgcaaggagatcgctgaggagttgttcagccgctcactggctgagagtgagcttcgtagcgccccttatgagttcccaga

SEQ ID NO: 777 - DNA, 284 bp, Homo sapiens
  misc_feature (1)...(284): n = A,T,C or G
ggcctgtcccagaagttcctctgnngaccaggctggcctcggactcagagatccacctgcctacnctgagaattgttaaaatggacggtgctacacaggaagagaccattccagtatggactggccattggaaaggacggcacagtatctggactgttctgtgtcctnaggatgctgcggaatgaacacacatctgcgcaagaatacagtagcagaaaccacatctcacacttgataggggagttggaactatgaatattacagtctataataaataacacata

SEQ ID NO: 778 - DNA, 199 bp, Homo sapiens
  misc_feature (1)...(199): n = A,T,C or G
gactgagatatcttgataatggaaataataaaatggcaattcagcaagctgataaactgttgaagaaacacaaagatcttcactgtgcaaaggttctcaaggccattggtttacagagaactggcaagcaggaagaagctttcaccttngnnaacttggaggatatagttggnttgaatgngctttaaagaaaaacaaa

SEQ ID NO: 779 - DNA, 366 bp, Homo sapiens
  misc_feature (1)...(366): n = A,T,C or G
ctgaaagccggtctctaccgtctaaccaccacgtttggngaacatgtgaacagctgngcaggcatctgcagaacatcagaaaagacttcagcaattcttggagttcaaagaatagtgaagtagntataaacctgtgttcattacccctgctgatacaactacagatgggcacaagnnaatgtcgagcatttcttgggatcagaagagagccggactaattagacgctnncttttgtcgatgntgctntgctttgaaaactatactnncntggggaggantncatngganagaaattctncancngantaancccgnaaaactgcccttctctngtacccangtgctttttttgtggggtgttggta

SEQ ID NO: 780 - DNA, 547 bp, Homo sapiens
  misc_feature (1)...(547): n = A,T,C or G
gactgagagaaaaggaaagcaattcaggttcagacgactagaatctttcgtgcatgattcctggcgacagcaacgtgacaaggtgcgtgtccagcggctggaggtgaagcctcgtgctttggaggtgcctgataaacatcccttggccttcgttatacgcatggaaaggattgaaggagtgagtttattgggtaaagagcaccatcatgaaacttggcctgaagaaattgttcagtggtgtctttgtcaaggtcacccctcagagtgtaagaatgctgcgcacggtggagccttatgtgacctggggatttccaaatctgaagtctgtccgggagctcatcttgaaacgtgggcaagcaaagattaacaataagacagtccctctgacggacaacacggtgatcgaggagcacctggggagatttggtgncatttgcctggaagacctcatccatgaaattgccttccctgggaagcatttccaggaggtctcttcattttctgngccctttcctnctctctgnggcccgncatgctaccaggacac

SEQ ID NO: 781 - DNA, 393 bp, Homo sapiens
  misc_feature (1)...(393): n = A,T,C or G
agcagcaagtgatccagtctcgagtgaatgaccaggaaggccgagaagaattctatgttcactatgtgggctttancnggcgactggnccnaatgggtggacaaganccgactcgnactgaccnngacagtgaaggatgccgagcagaanaactactgananatncctgatgtgagctggccgagcagccagagctcangatcactcgaaaccaatngcgaangcatgatganatnanccntgtgcnganggcnctggcccctcccttctcagnacnatcacngcttanccatngcnactcncatgtgannggcagcccncagggaaggagatctntcnatntgagcancatcnttgtgnatgacgtggctggcaaagaccacaagatatact

SEQ ID NO: 782 - DNA, 416 bp, Homo sapiens
gactgaggtagccttcatggctgtgccacatcattcgcaggagacttcctatctgctgcctccagatccagaggattgggagaaacaaggcatcccggactttgtctatggccaggaggatctcgttggcaaggaagttcagtggcccagggattcacctagtgccgtggacacagtaccactatcccgtttcgactctgccctccgctctgcgtggaggcagcggctggaactgggcctgtttcggtaccgcctagaagatctgcagacccaaatcctccccggttccgtggggtttgtagctcagctgaatatagatcgagggatacagaggaggcgcccccagaatatcagaagtgtgaggcaggagtttgacccggaacagtttaacttcaataaaattcgacctggagaag

SEQ ID NO: 783 - DNA, 333 bp, Homo sapiens
  misc_feature (1)...(333): n = A,T,C or G
ttcggtgctacagagtctctaatcttaaaagctgaagggaaagnggagtctgatnncttttgncaattaggtcacattcancctcttatnggaagatnatncaaaagcnttatnntgcataccatgnggtacntacagtntacagtctgattactggaagaatcgctgcctttttatataggtcttggtttggtctacttccattacnatgcattncagngggctatnaaagcattntnaggaggtgctcctatgtncgancccagctttttggcgagccaaggaannttnatttacgactcnnggcttatcgttcnaagcgaacacagacta

SEQ ID NO: 784 - DNA, 398 bp, Homo sapiens
  misc_feature (1)...(398): n = A,T,C or G
aatacaggcttgagcaagagcctgtgagaagacggatngngcaagagcgagccagagcgagacgaagatggcaggaanttgccatgtggtcaagagtagcatgaagaactgctgcagagccctcatttcattcttcctcgtacacaatgaatcacgttgggatttcattccggggctatgtacacaaaagtgncangaggaaaatgttctctactcttgcataaaaatgtgtccagtgcttcaggaatggaacttctgctctgccgggcagggcttcagggattctgccgccagagatgaaaggctcctcctcctgttttatngntctgnaattcccgaggngttaatcatccanccctggncngctccccttgnngggatcctcggtgctattctga

SEQ ID NO: 785 - DNA, 376 bp, Homo sapiens
  misc_feature (1)...(376): n = A,T,C or G
tgagggagacaggatggtgntgtcaaaacttccaagttnttctcnnagatntncngcaacncgggggncacnatccagaagnnctaccccntngtncccntcttcctcctggnccactncatgggcgggtgccatctccntcctantggctgnanagaggccaacctacttttctggcatggtcctgatttcacctctggtccttgccaatccggaatctgnatcgactttgaaggtccttgctgccaaactgctcaattttgtcctgccaaatatgaccttgnngcgcattgactccagcgtgctgtctcggaacaagtcggaggttgacctgtacaactctgacccactcntctgccgagcagggctgaaggtg

SEQ ID NO: 786 - DNA, 140 bp, Homo sapiens
  misc_feature (1)...(140): n = A,T,C or G
ctcctccgaaaaaaactgttcggtttggcggaactgngacagaagtcttactgaaatacanaaagggtgaaacaaatgacttagagttgntgaagaaccagctgtctgatcctgatataaaggatgaccagatcattaag

SEQ ID NO: 787 - DNA, 290 bp, Homo sapiens
  misc_feature (1)...(290): n = A,T,C or G
actgatattgcagtaggtgaanaaactataaaggatatgtcagagaataaacaagaagtacatccagatactattacagatgtggaagctgttatagatacagaggaagaacttattaaagaatgtgaagaaatgtggaaagacatggaagattgtcagaataaattatcacttattgggaactgagacactcacgaatgcagatgctcagctctcatttacttatttatgcaaatggagggggntggactggctgaaccttgggncaatggaaaaaaagaaaccccgaa

SEQ ID NO: 788 - DNA, 268 bp, Homo sapiens
  misc_feature (1)...(268): n = A,T,C or G
tggcgttttttgatgaagaataanaaatttaaatttcaaaccactttcaccttggaggagctgactgcggtccccttcgngaacggggtcctcttttgcaaggtccgnctgctggatggcggngattttgtcagcttgtcatccagtggtcttcaaatgaagatgatgaantcttatactctacntgcnccatgcctgcctggatgctgccatgtnnctgccttgatgataangaactgaacctctnatcctgtaaactaaccccaat

SEQ ID NO: 789 - DNA, 261 bp, Homo sapiens
  misc_feature (1)...(261): n = A,T,C or G
aagtactgaaggctttgtggtgtgtgggggttgnactcacatggctgcagccagtgtgacttcccctggctccctagaactgggngggnctggtttctccaaaaccctcctggggaccaggttaaaacccaagtacctctgttcancctgcaaaaaacatcctgcgggaggccctttccaggcccagtggggncaccnnntactggntccttctgcctgaccaggatncctnanggtgtgcatcccattggggggggggtg

SEQ ID NO: 790 - DNA, 245 bp, Homo sapiens
  misc_feature (1)...(245): n = A,T,C or G
tggccctggtggctcaggtactgatgctggagaatgggctactgcggactccacccatgggctggnnggcctgggaacgcttccgctgtaacatcgactgtgtggaggacccgaagaactgcatcaggnnaactcttttttatntaaagntnggnatcnatgacnnaatggngnatantgaccnctggggtntacnttcctacncctctaaaantggtggaagnggggggcggaaacccttcggg

SEQ ID NO: 791 - DNA, 297 bp, Homo sapiens
  misc_feature (1)...(297): n = A,T,C or G
gccctgattgagcagactgaggaagcagnggccgcacttaactccctccccgaggtgcctccctggactggggaggtcaacccacctctgagagacggcngtgcttctagggcgcanctccttgggacccctccgatagatctgccctcttgaaaagcaaactgagggctctgngnggntggccctcggagcctacnaagatccagctgcttcgggggtaggattgacaggattgnnccccanagtggactagggttgaacagnttccggnaccgaaaataacagccaagggggaaa

SEQ ID NO: 792 - DNA, 294 bp, Homo sapiens
  misc_feature (1)...(294): n = A,T,C or G
cttttcaccggtccctaacctgtaccanntttgggannaggatggaaattnaccanagactcatcaagtccataccactcctgctccactgcagcaggatcaaancangaaggggaatgggagatgcatagaaaattggaaccacagaaaccaggaagtctcctttctgggacagccagngacgctccagcacctcctccagnccctggtccttggcacagcccctccctcatggctggatcctcagatcataatagggccttggagcagggtttgagggtggggatggggatt

SEQ ID NO: 793 - DNA, 167 bp, Homo sapiens
  misc_feature (1)...(167): n = A,T,C or G
acctctgcagtgtcaacanggctcaaggangcaggatggatcncgatgtgnctaacatgttngngattgcgggngggaccctggcnattccaatcctggcattngttncntctttcctcctgnggccttcagcactgntaagaatctattattggggggtgactcag

SEQ ID NO: 794 - DNA, 248 bp, Homo sapiens
  misc_feature (1)...(248): n = A,T,C or G
tgacttactaccaaatgtgtggtggatgttgaagcgaacaaagttattctgaatcctgtaaatacaaatctttccaaaggagatgcccgtttnntaacnaagacannntngttanganactnntcatnccccacatcctngaaaaccatnnttcnggatgtttgccaagtatggactnnggtnattatatnnntntcaaaaanatttattcaaacaaaatcttaaaggcatccctaagttaaactgac

SEQ ID NO: 795 - DNA, 276 bp, Homo sapiens
gagacataaaattatgaaggatatcaccagaagctatgtaaacatttcatctaaggaccaagagaagttcaaggtgttttcacaaggaaaccaaagagacaactgatatgaaagagctgaccgcagtcagagaaatcttgggaggagaactagagtgaaggacaaggcgatgagcaggtgggagagaaaaagcaaacagctcaaacagatcctgtgaggcgggcgacccaggacgaaggctggctttggcgttatctaggtaaccccggtttgttg

SEQ ID NO: 796 - DNA, 105 bp, Homo sapiens
  misc_feature (1)...(105): n = A,T,C or G
gagtctggggagctcctgcntaagtcagactgagggtacaaaaatgcagagcaataaagcctttaacttggagaagcagaatcatactccaaggaagcgtcatgc

SEQ ID NO: 797 - DNA, 434 bp, Homo sapiens
  misc_feature (1)...(434): n = A,T,C or G
ggtatggcagctggcgagaactggccaaggccctagccagcaggaacatcccagccgttgatccgaatctccaattctaccgtccccagcggctgagcctcaaggaccaagaaattgcccgaagtaggagtaggaacagtagctacctgaagtggaacaagcctgtcccctggctctcagaggtacaatgtcgctgtcttcagacactccagaagtaggagtcagattttgttacggatggttgtgagccaccatgtggttgctgggatttgaactcnggaccttnngangancanncgggtgctcttacccactgagccatctcaccagcccacctcttgtgatcttgactagaagtaccttcctaacccagctcttccactgtttttaaataaataaacaaacaaataactcactgaccttaaaaaaaaaaa

SEQ ID NO: 798 - DNA, 238 bp, Homo sapiens
  misc_feature (1)...(238): n = A,T,C or G
tatggatatcaattctcctggaagaaaaataagaaggccggaggggnnctatctgaagaggaagtgtttggctctttctnggnaanggntatgcaaatactggcaagaatgagcggctaatgagccactgctaggtaaacatagtgggaggaaaaccaatanccnctggacccctcagcacnactgnacgagcccagnctcntccaatcaacggaacccagcaagaaaaacccctacc

SEQ ID NO: 799 - DNA, 406 bp, Homo sapiens
  misc_feature (1)...(406): n = A,T,C or G
ctcctgcattaagtcagactgagtgtggttttgcttgtggccatttccagtgcgtttgaatttggacccgttgctgggagagaccttgccatcagagataacagcatttgggaccagaaagaacctgccgtacngcgatcggtctttccagttcgtgccttccgtggggatacagaacagtaagtcgcttaataaaacttgctgtctgaatggagggacttgcatcctggggtccttctgtgcctgccctccttccttctatggacgcanctgtgaacatgatgttcggaaagagcactgtggggtctatcctcngtnggtacctggctgcccaagaagngttcccttgtgcagatgctggcacggcccagctccantgncttcctcaagaccttttctacctggc

SEQ ID NO: 800 - DNA, 199 bp, Homo sapiens
  misc_feature (1)...(199): n = A,T,C or G
agttcctccatccacaaatnatgcantcgagtttcctcgaatttggggtcaatacacacagagtgcaatggatgaacctcgctctggagaaatcncctgcatantcatggnatttccccttncaggatttatacagaagcagtcttccaaattctgaaacctgatgcccatcacatactttgggctgagaaaagaaaat

SEQ ID NO: 801 - DNA, 114 bp, Homo sapiens
  misc_feature (1)...(114): n = A,T,C or G
ctgccttgctccatgaagtccaggacantntgacatgcacttgtttcttgtctcttcatttgaagaatagtcttcgtccactgtgtacatttttttttgttaatagggaaggag

SEQ ID NO: 802 - DNA, 312 bp, Homo sapiens
  misc_feature (1)...(312): n = A,T,C or G
aagactgaagtccgtgcccctcgcctgcagctgccatggaagctccttggaccctttagaagcttctcgccgccatcacaggagccccagaggatgtgcagcggggtctccccagttgagcaggtggccgcaaggggacatggatgacacggcagcacgcttctgtgtgcagaagcactcgtggggatgggctgcgtaaccattatccacnggcagtcgcaagtcctcggccctcattgtcagcgnggggngcccncgactttccagtttgtgcagaancctgacaagtctgccccccatctcaccgtctct

SEQ ID NO: 803 - DNA, 251 bp, Homo sapiens
  misc_feature (1)...(251): n = A,T,C or G
aatatcttttgcacatgantgttctgcctgcatggatgactgtacagcangctcatgcagtgatgaaggagaccagaagaggtccttgggaatanagttacaaacaattttgaaccaccatgtgggtgctgagaattgaacctatgtcctgtggaagatcagccagtgctcttaaccactgagaaatctctccatcacctattcttgtggtttggtttttctttttctttgngngtttctttttttttttt

SEQ ID NO: 804 - DNA, 226 bp, Homo sapiens
  misc_feature (1)...(226): n = A,T,C or G
atactgaaggcactattgctgaggtagaacagatgtgnttgagatcgaggctaaactggacaagctggtcaaactgtgcagnggnatgatcgaagccggcaaatcctacgtcaccaccaacaggctctttgtgagccggcgtccgagacctgtctcagcagtgccagggcnacaccgtcatctcggaatgtctgcagaggtttggagacagcctacaggagatgga

SEQ ID NO: 805 - DNA, 255 bp, Homo sapiens
  misc_feature (1)...(255): n = A,T,C or G
atactgaagaataggagggggagccccgaggatgacctgattggaatcccattcccagaccacagcagcgagctcctgagctgnnngaacgagcagngccagctnanccatctgtgcgacctcaccatcaggacgcagggtcttgagtaccgcacccacagggctgtgcttggctgcctgtanccactacttnaagaagctcttnncgggaggnaggagggggaaannnggaatgngaactgggggggggggggg

SEQ ID NO: 806 - DNA, 271 bp, Homo sapiens
  misc_feature (1)...(271): n = A,T,C or G
gaactgagttctggcaggtgatctgtaagacagtgactgantatggatcatttgaacgaggcaactcaggggaaagaacattcngaaaggngntaacaatgtgagtgatccgaagggtccacccgccaagattgcccgcctggagcagaaccggcagccctctaggaagagganggcttgggagcacaggttggaaagatgcagggagtgcctttaaancactcgggccatctcatgaaaacngggggtaggaaaggaaccatgtttccca

SEQ ID NO: 807 - DNA, 272 bp, Homo sapiens
  misc_feature (1)...(272): n = A,T,C or G
ggtctatgtgcactagnagtaattctgncacaatgcctgaaataactaccagccatcttgnngaaaaacaggntcaggntctagcggngatgtgtattcttattgatgaaaatgacaataaaattgggggctgacaccaagaaaaaactggtcaccttaatgaaaacatcgacaaaggattattacatcgagcttttagggggcttcttgttnaatactgaaaanaagctcctgttgngggggngatcagatgctaaaattcctttccaggg

SEQ ID NO: 808 - DNA, 285 bp, Homo sapiens
  misc_feature (1)...(285): n = A,T,C or G
atgcagcagctgccccangccctgtgcttggcaacattccccccaatgatgggatgcccggaggccccatcccgnnaggnnnctttcagncttttatganaccacaatatcncagngcgacncaaagcctccaantaaaatgggaaaccatatctatnggaggagttcctgggacacagatcattgctgccnaatnccanggatcccanacgacaacaaggacacnccaacatgggnggnggaatgcanannatgaaccctcccngaggggatgggggcccatgg

SEQ ID NO: 809 - DNA, 286 bp, Homo sapiens
  misc_feature (1)...(286): n = A,T,C or G
aaatttccccagtactgcagaagnacaggnattcaaggacaacctctacagccaacccagttgagggccagcctgttctatcgagatcctgtctngnggacagaaaaagtttcatgagancgtggtgtgttggcacaatcttttatttccgagcacttgacgcattaaaattaagggcagatcttcatgatttgggggcgggccctgggcttgattccaaagaaccttgtttccaaaacaaacaaacgaaaaagttgtatgggggggggggggccaagggttttgg

SEQ ID NO: 810 - DNA, 244 bp, Homo sapiens
  misc_feature (1)...(244): n = A,T,C or G
gactgaggtacctcctgnatgatgtcaaccccncaaaggcttcaatctccgcagggatgnctatatccgggtggcatccttgctgaagacgctgttgaagactgaagagngggtgctagtcctgcccccgtggggccgcctctaccactggcaaagccctgacatccaccaggtccggattccctggtccgagttttttgacctcccgagtctcaataaaaacatccccgttataaaaaaaaaa

SEQ ID NO: 811 - DNA, 190 bp, Homo sapiens
ttttagggacttcctgaagctgttttgagttgtttacttatggatcttcactgcaagatggactgttccaatctcagaggaactcttccagaaacctgtatagactactttggccttgaactcctacaggtgggcctgcctttgcttcctagtgctgggattaaaggtgtgtatcaccacaaaaaaaaaa

SEQ ID NO: 812 - DNA, 136 bp, Homo sapiens
  misc_feature (1)...(136): n = A,T,C or G
ggcttggggagatccgcttgtcaggggnncatcctcttccaggctgagggctcccgttagacactctcacgtttgacatcttcctcctcggggcgggtgtggaccaccgcctcgcctntctccggaaaaaaaaaaa

SEQ ID NO: 813 - DNA, 236 bp, Homo sapiens
  misc_feature (1)...(236): n = A,T,C or G
gactgtgcagttgttgctcctggtgatgtggatggctcnaatgtgctcactgccagagctacttcgggnccagnactgaacttntcaatgtctgcatgggatgccanncaccacaaagaaaaanccgggcccctggaggacaattttacacgaccaggggcanccccctgggaagancnaattccctggctgttcccacgaaacaccaagcccaggaagccacattaagggacgtt

SEQ ID NO: 814 - DNA, 177 bp, Homo sapiens
  misc_feature (1)...(177): n = A,T,C or G
aggtgatttgccgttgagaagctcgctacttcgcacacaaacaggaggtacggggactcaaaccccacattccctctccaccctcggccttctctctctgctcgtcttcaaaattgtttgaagtttgaaatttcacgaaattcattgtagcanaaattangcccgttgtacaaatca

SEQ ID NO: 815 - DNA, 238 bp, Homo sapiens
  misc_feature (1)...(238): n = A,T,C or G
cgatcagtagagggaccagaaacttctctgcaaagtggcctgcacaagctcaaaccagccaacgtctcagtgtggacagggaagggctcatgaagtgctacccctaactgagaagtcactgacagttggaaggacgagttggggttcttcacagatgtggtccctgaaaggcttacccgtgctcctngtcaccagagcacaggaaattgggaggagaatggggggggggggggataga

SEQ ID NO: 816 - DNA, 207 bp, Homo sapiens
  misc_feature (1)...(207): n = A,T,C or G
ggctcaataacattgagcggcccctgcttatcttcggcaccaagtttgacctgagacagtggttcctggtgactgactggaacccactcaccgtgtggttctaccgagacagctacattcgcttctccacacagcccttctccctgaagagngcngggacaactgagtgcaccctcctcccctgactatccagactagtgtggaggt

SEQ ID NO: 817 - DNA, 460 bp, Homo sapiens
  misc_feature (1)...(460): n = A,T,C or G
gactgaggaaggatttttgctgggagaggtaagacaagaggaaacttttagcatcagtgactcacaaatcagcaacacagagtttctgcaagtaattgagatccataaccatcagccttgttcacaactcttcagtttttatgattatgcgagcaaagtgaatgaagaaagtttggacagaattctgaaagatcgggaggaagaaagttatcggatggtacaggttccggcgaaacacccagcagcagatgtcctacagggaacaggtcatccacaagcagctcacccgcatcctcggngtgccagacctggtcttccttctcttcagcttcatctctaccgccaacaattctactcatgctttanaatatgttctctttanaccaaaccgnaggtataatcaaaggatatcacttgntattcccatctaggcaatactagccagcaggagtccaaaggg

SEQ ID NO: 818 - DNA, 169 bp, Homo sapiens
aacagcttgttgcacaagcctcaggacctgagttcaattcccagaacccatggaaaagatggaaggagagagctgacttgacaaaactgtcttctgaccactgtacactggactggagccacggactgcattgtacaggaaaataaaacaatttgtatgaaaaaaaaaa

SEQ ID NO: 819 - DNA, 464 bp, Homo sapiens
  misc_feature (1)...(464): n = A,T,C or G
tgaaggtgaagcttcctgttgaagatggcagacccagtatgttctcactgaagttccggcggcattgaagcgggtagccaagtatgtcatccggggcttttatggcattgagcacggtgttggccttggacatcttgatccggaacccctgtgtaaaagaagangacatgctaggagctgntcaagtttgatcgggaagcaacttcgatccgttttgaataatttaaaggganacaagtncatcanatgcanaatgaggntagagactgctgcanatgggaagaccacccgccataactactacttnatcaattaccggactcttgntaatggaagggaaanataagctggaccncatgaaaaggagggattgaaacagangnagagaaattcccccaatcgggcttcccttcaaatgnnctgtctgntgcagnactttcactganctaaaaacccatcaactg

SEQ ID NO: 820 - DNA, 280 bp, Homo sapiens
  misc_feature (1)...(280): n = A,T,C or G
acctgactgccgagattgtcacgacttcctggcctgattctgcaccgcctgantctgncagngaccgacaggctttgttcaaaagnatgcccaaacctttttggccctctgtgctacagattacacctttgcgatgnatcctccatcccatgatcngcacagggcagnattgggggcanccgngctaggcctagggnggccngctctatgtctgggggatgaacctnacaaaagttgnnnggcccgggaatcacaaggncnctgaaggccccccaggcct

SEQ ID NO: 821 - DNA, 319 bp, Homo sapiens
  misc_feature (1)...(319): n = A,T,C or G
gtcttttgccgcttcatgtcntccatggctcctcaagacatttgtcctcatggtaggacttgccactgttgcgtttatggtgagaanggtgtncctnacaacagactncngcaccttcaanccaaagtttccagannctgnatgggtngacccanggctgaagctttctaccanaggancatctgaggaanctctttacctacagtgacatctggctcttccccaaaaatcagcggggactgtaactctgncaaactgcgantgaaatataagtttcnggatgcctatanccagaacgnccttccagctgggaatgcca

SEQ ID NO: 822 - DNA, 367 bp, Homo sapiens
  misc_feature (1)...(367): n = A,T,C or G
cccctgccggagaagaaatgggngactgtgggtagatacctccctgaggatattcaaatgggtgcctgtgacagatagcaaggagggattttgaactttatacaaacgaatcgtagggctggagagatggctcagcagttttgatggctcagcagttttgagcagtggatgctgttccggaggacctgagttcagttcccagcccccacatggnggctcacaaccttcagtaactccagttccaggagatctggtgccctgttctgacatctgctggcaccaggtagatatgtggtgcacagacggtatatgcagccagtgcaccgtacacataaaataaaaattgaaaaactggaaaacaaaaaaa

SEQ ID NO: 823 - DNA, 428 bp, Homo sapiens
  misc_feature (1)...(428): n = A,T,C or G
ggcttgcccctgatcagcctgagtctgatctgaagattttggtgtttaaggcattaagaacatagcctgaatngttcatggagtttttcatcagtatgtctgaaaccataaaatataatgatgatgatcataaaaccgctgtttctgaaaaacactggaacgaacagcggcctgggagggagaatttctgcgacatcgccttcgtgggttgaaagatgtaaagttcccgagcccaccgggggngntcctcgcccgccttgcaancacgttacttttnaanaaagctttttcaannaaacctagaaagtnagaacacgccccncccccgtnataagagaatagnatttccctcccgctnctnacaatattttngaagagggtgctgaacttacatngtnncnccggccaggatttccggagaaaaaggg

SEQ ID NO: 824 - DNA, 430 bp, Homo sapiens
  misc_feature (1)...(430): n = A,T,C or G
gactgagatgacggcccttcttaccaaccaaacagaatgaggaatttcgtcccttcattcgaaggcttccagaattcaaattttggcacgcagctacaaaaggcattcttgtggctatgatctgtaccttcttcgaggcttttaacgtcccagtgttctggccgatcctggtgatgtacttcatcatgcttttctgtatcacaatgaagaggcaaatcaagcacatgattaaataccggtacataccattcacacacgggaagaggagatacaaagggaaggaggacgtgggcaagacatttgctagttagaagctggactgattctcacacggactcaagaacggttttgagccattgtaacaatgcctttttcttcacataaagtagttgattatgaggaagnngaattntctttttaagaggagccc

SEQ ID NO: 825 - DNA, 122 bp, Homo sapiens
  misc_feature (1)...(122): n = A,T,C or G
atactgagtatagtaagaagacatggtttccccccacttccacagcacgtctaagttttatcttttttggggtccttatctgtgggccacantggaacanctgtgaatatcacgctgttaaa

SEQ ID NO: 826 - DNA, 188 bp, Homo sapiens
  misc_feature (1)...(188): n = A,T,C or G
gaactgagcatcttccccacccccagcccccangaccaaggacaggctgngtccagacagaaactgttcagcatcccagtgaatggacaattgcactgaactccacaagcatcccctgccccgtgcccatgtcctgagatccttatcccagatggaaaagttaaatcgtggctttgaaaatccaaact

SEQ ID NO: 827 - DNA, 203 bp, Homo sapiens
  misc_feature (1)...(203): n = A,T,C or G
gactgagtatcttcagatgaaatggccactgcttgatgtccaagcaggaagcctccagagcagacaaaccctcaaggatgctcgttcgccgtcgccagcacacatcgttgtaagtaacctctcagtgagagccncccctctgttgagggtaaaggatcttttgatgattaaaaactcntatttgtctgttctttaaaaaaaaa

SEQ ID NO: 828 - DNA, 471 bp, Homo sapiens
  misc_feature (1)...(471): n = A,T,C or G
gactgaggtcctccttgtggttcatttctgggcaccatgggctccacagtgtgtacagatgaacgatgtcatggcagagttagctaaagaacaccctcatgtttcatttgtgaagctggaagccgaagctgttcctgaagtatctgaaaaatatgaaattagctctgtccccaccttcctgttcttcaagaattctcagaaagtcgaccggttagatggtgcacatgccccagagttgaccaaaaaagtccagcgacacgtgtctagcggagcctttcctcctagtactaatgaacatcttaaagaagacctcagccttcgcctgaaaaagctgactcacgctgccccctgcatgctgttcatgaagggaacacctcaagaaccacgctgtggtttcagcnagcagatggnggaaatccttcacaaacacaatattcagttcagcagcttttgatatcttctcagatgaaa

SEQ ID NO: 829 - DNA, 340 bp, Homo sapiens
  misc_feature (1)...(340): n = A,T,C or G
gactgagatttgataatgggctgcattaaaagtaaagaaacaaaagtccagccataaaatacacaccggaaaatcttacagagcctgtaggcccaagtgccagtcattatggagtggaacatgctacagttgccccgacctcttccacaaagggagcattcagtnaattttaaacagtctttcnatgacaccctttggagggtcctcagggntgactccttttggaggagcgtcttcctcattntgagnggtgtcaagttcatatcctacagggtttancagaggatgggcaanaaagtgatactttcctntggaatnaagaagccctaaaagtataaac

SEQ ID NO: 830 - DNA, 238 bp, Homo sapiens
  misc_feature (1)...(238): n = A,T,C or G
actgagattcagagtcatggngctcagcgangcgaatttacagacactaacagagtntttaaagaaaaccctggatcctgatcctgccattagacggncagctganaagtttctcgaatccgtagaaggaantcagaattacccactgttgcttttaacattattggaaaaggcacaggatantgtcattaaagtatgtgcttcagtaaccttcaagaactatattaaaaggaattgg

SEQ ID NO: 831 - DNA, 276 bp, Homo sapiens
  misc_feature (1)...(276): n = A,T,C or G
gactgagactccagttctcatctggctccgtttttaaactcccaccttgtcactcatctcgcctccttggagtgacatcatgaaggtggtgaacctgaagcaggccattttgcaagcctggaaagagcgatggagtgactaccaatgggcaatcaacatgaaaaaattcttccccaagggagccncctggggactttctcaacctancaaaagcgctcctggagcaggctatgatngggccttcccccattcctttgatcctgtcgtacctgaaga

SEQ ID NO: 832 - DNA, 167 bp, Homo sapiens
  misc_feature (1)...(167): n = A,T,C or G
aactgaggtcgcagacactttgtgaaangagtgagtcagagacgacgacntaccccngctctcttcccataccttagcagctgnccaggagttttatgcttgagcagaaaccaatccgtcaaccccagaggggatgataaattataacggttggggtaattagagga

SEQ ID NO: 833 - DNA, 116 bp, Homo sapiens
gactgaggttagaaagaatcaaacaatgcagacataattcatctccttaaagattgcgccctagtacttgaaatgctttttatttaaaagagtagtaaaaatggaaaaagaaaaaa

SEQ ID NO: 834 - DNA, 390 bp, Homo sapiens
  misc_feature (1)...(390): n = A,T,C or G
gactgagggacagagtcattacagttgaaactacagagtattctgctagcagccttcagatgaagatgtagaactctcagctcctcctgcaccatgcctgccgggatgctgccatgctcctgccttgatgataatggactgaacctctgaacctgtgttgatgtgctgtcgggacagctctggagcacccttaaagtccagctcttccatctccgcttcatagaacttgcggcagaaatctttaaaagactgaaacagggcaacacgaaagtgattagcaccaacagcctcctttccagtgcacaaaatcaaaatatcaaaatgtaatgggngnacagatttgattngcaaagaaaaangnggaaatgtataaaaattcaaaaaaaaaaa

SEQ ID NO: 835 - DNA, 266 bp, Homo sapiens
  misc_feature (1)...(266): n = A,T,C or G
actgaggaggtgcccagacatgggtgactggagcgccttggggaagctgctggacaaggtccaagcctactccacggccggagggaaggtgtggctgtcggtgctcttcattttcagaatcctgctcctggggacagcggttgagtcagcttggggtgatgaacagtctgcctttcgctgtaacactcaacaacccggttgtgaaaatgtctgctntgacaagtccttccccatctctcacgtgcgcttctgggtaaaaaaaaaaa

SEQ ID NO: 836 - DNA, 212 bp, Homo sapiens
  misc_feature (1)...(212): n = A,T,C or G
aatggaggctgaagagttaattggcagcagtgtgacgattgattccatcatgagcaaaangagagntnttanaaatatgatatgtgaagactgtactgatgagctaagcttgtctaaaatccttgtgccgatcacaccgaaactggntaanccaaaattatgagggttggggaacaccccanagaactggctgaattttcttgctgaaacta

SEQ ID NO: 837 - DNA, 238 bp, Homo sapiens
  misc_feature (1)...(238): n = A,T,C or G
ggacctgccctgcctgctacnnnganngtnnnnnacaggaccataggtgnngcaagacctacagcancctgntcanagtggtgggacgttgcattcccancccagatctgatcgtcttactagagcaggagaagngagcccctgnatggcttgggaaaaaagaaacaggcagcccgagcccaaggttttggagacaggntttccnancctgaaaatnaganctccaaaaaatcatgtt

SEQ ID NO: 838 - DNA, 364 bp, Homo sapiens
  misc_feature (1)...(364): n = A,T,C or G
actgagagaaatgcaggcagnagntcaggatggnaccgaagattccgatttttctacngatctcnagcatacagacagntnanagagtgatggcacctcgcgccgatctgcccgagtcacccgctcctcagccaggctaagccagagttcccaagattccagccctgttcaaagatngncagtctttngnaactgnggagcctgnctattctaccagaagggtgacccgtagtcagcagcagcccacgccagtgactccaaaaaagtaccctcttngacagactcgctcatctggctctgaaacggagcaggtggtggacttttcagatagagaaactaaaantacagctgatcatgaggagtc

SEQ ID NO: 839 - DNA, 244 bp, Homo sapiens
  misc_feature (1)...(244): n = A,T,C or G
actgaggtttaagtgccccatttgttccaagtctgtggcttccnatgagatggaaatgcactttataatgtgtctgancnggnctngngctgtcctacaatnatnatgtccctnactaaanatgccgggtgagtgtgctaatctccctgaagaanctgcttcaggnggncacaatagccagcctgccttgccttgtncatctataacaaaagnctgcntaanctcatggtttagaagtgaacag

SEQ ID NO: 840 - DNA, 368 bp, Homo sapiens
  misc_feature (1)...(368): n = A,T,C or G
gactgaggtctactgctgctntgctctacangggttacttcctccaggactgccanctgtnngatcanaataccgtgacactggtgtggcttgaagnatattnacncctcnccngagaatctctaangctacntactcacccacttctganaggcgtcaaaggttccaancgaacnctgcctggntcactagcatcagaatttcacagatttaggttcattctncttgcctcagaaattgatcaaggggcacattcccctgatgttaactgcaaaccttgacgagtctctnaagacagntcaancttcanncncgntttgggctttctgaacctctgggccaccttcagctccatttccttgacaagg

SEQ ID NO: 841 - DNA, 374 bp, Homo sapiens
  misc_feature (1)...(374): n = A,T,C or G
gctctggaagctatggaccagcangaccttccagaagagagagaccgatggcagtgggtgaactgataagggccctaggtaggctnaaagtgnccacggaccaagatagcattgaatttggggcatctgggggctggcttgactttataaattggacctgntaagcnaggttcctttggactgggaatgnaaagaaggtggtcacttgnnnaaataaatctggatggcccttggggcntacccncgncccccggggngttttctgggaagcnagtngngaaaaagggggtgcctttttaaaaaagtttttnttgttaaccaactgggcccccacccntttaaattnttgganttttaaaaaaccccctttggaa

SEQ ID NO: 842 - DNA, 275 bp, Homo sapiens
  misc_feature (1)...(275): n = A,T,C or G
gactgagatggtggaccgggcaagattactgcttgctgccttgagtganagtgggattantccgaatgacctctttgatgttgatggtggagatgctggccttgccacccntacncccccttcanttcaacagaagcngcctccatccacttcaacagctnggggctgaatcacaataantcaacttccatctttgngatntnccaatanncnatgactcactcccccncctgctaaatacgaaggggganaaccntcacctatgacaaattatc

SEQ ID NO: 843 - DNA, 394 bp, Homo sapiens
  misc_feature (1)...(394): n = A,T,C or G
gaaaaccggccattgaatagaatncacngtcaagccgannatncnanccggannatgtgattatncangctanngngcatatgctactggagacnacaaagcctgtttccctcgganccaatccgctggcttaaattttgcagaganaatcacgtcagnccncagaaantcttcctctgtagccatctgnnanncnnngngtntnaantaaatgactgtgnctaatcagnncacagcctcatggagantgactcctacccctctgttcctgaggtccaaaatgnacttanatctgctgtcccanagccagaggaggctcacntagacctcggagggggactcttggaagtcactggctttcctttccccttgctgccaagaccatattctgaag

SEQ ID NO: 844 - DNA, 429 bp, Homo sapiens
  misc_feature (1)...(429): n = A,T,C or G
gactgagatgggctggttaaaagaaaagcagcttatcgaaccgaggtgagcgatgaagacatccaaacaatgccatgctgtacaccgggagcactttctatttgcctgggaaactacgagcggagcccctggatgccattccactcgaaggcccccaagtctcctaaggcactgcaagtaagaaggagccgggctcaccatgaattcactttgaagtaggtgggaacttgccacgacgtccctnagctgtgaccgtgtgagaactcggctggctgactgcaggtattccatggctaccttctcccggggggttgagacggncacaaagggttcnacactgcccaggctactcatgtccagcgtaagagatacattggaacctcgnctacatgggggaaagaatgntattacatttaaatattcatgaat

SEQ ID NO: 845 - DNA, 143 bp, Homo sapiens
  misc_feature (1)...(143): n = A,T,C or G
tatgctggatgagcagtgggnaccatctanatcgcatagaagaaggcatggaccaaataaataaagacatgagagaggcagagaagactttaacagaactcaacaagtgttgtggcctctgcatctgcccttgtaatagggcc

SEQ ID NO: 846 - DNA, 249 bp, Homo sapiens
  misc_feature (1)...(249): n = A,T,C or G
actgaggatgggatgcgtgaagtccaggttcctccgagatggaagcatggnctcnaaaacagagccaagngccaatcagaagggccctgtgtatgtgccggatcccacgtcctccagcaagctgggaccaaacaacagcaacagcatgcccccagggtttgtggagggtgagtatctaggaagcttgggtctcagcatcannatacatncattancttagattctgagttgtaactgatgggggaaagt

SEQ ID NO: 847 - DNA, 407 bp, Homo sapiens
  misc_feature (1)...(407): n = A,T,C or G
tgttgggccttaagaggccccaccggtctttctttgagtncttnatccggacactcatcatcgtgggcactggcctgnctgaggntcctttnttcagtcctncatctgcgatggccacntggcctcctaatggaaggatcatctcttttggggcttgnggaactttctgcaccatcgggaaaccacagtggaaccacattgtcttgannagacctgagcccagggccccatatgccccgggcgtgggctggtagnncatgggncctnancncgccaagtggnggncccgccattggcnagnnggtgngccttnccaattttccccccttggaaaatgcttcattggtngncccaaggnggggtaaaaaagtnccgttnacgggacaaggngggcccatcgggttcct

SEQ ID NO: 848 - DNA, 143 bp, Homo sapiens
  misc_feature (1)...(143): n = A,T,C or G
tgatgaaaaaggagattntatgagcagatgancggtcctgtnacctncggctnccgccagnanaatggtgccggcgtnatcctccgagntgttgnaagagccggagagancatccagaattccttgggtggaagatgagggcc

SEQ ID NO: 849 - DNA, 171 bp, Homo sapiens
  misc_feature (1)...(171): n = A,T,C or G
agacaacgggaggcaccacagaagtctgtggaaagaacagnagatgaantgnccaganctggccttacagggccttcacagagaacgtnccacccgctgnaaactgatgccgggctccttccccncgggacggagtcttcaaacatatnggggataaaaatgtttcctggt

SEQ ID NO: 850 - DNA, 531 bp, Homo sapiens
  misc_feature (1)...(531): n = A,T,C or G
gactgagaactgtgcctggtgatcttgnttgcttcagtgcatctacaacatcggcctactcctccctgtcggtgattgagatgatctgtgctgctgtcttacttgtcttctacacgtgtgacctgcactccaagatatcattcatcaactggccttggactgacttcttcagatccctcatagcaaccatcctgtacctgatcacctccattgttgtccttgtagaaggaagaggcagctccagagttgtcgctgggatactgggcttacttgctacgttgctctttggctacgatgcatacatcacctttccctctaaaggcagcaaagacatacagcaggctcccactgaccccactgatgggcccggtgatcgtctttcagctgtctctgctacctggncaataggctcctccatcaaaaaactttcctcctgnnggggcggggggggggctccgcctttcctccaaagctntcaggagggagaaggcagggnggatccctggngaagttgaggccagggctacacag

SEQ ID NO: 851 - DNA, 483 bp, Homo sapiens
  misc_feature (1)...(483): n = A,T,C or G
tttaagcccgcgccctccgggtccgctttgcnggatcnccgctagnctggacctgncacgcggaccgcacggngagctncnggnaanggcagaganngacngagtcgaangnctngctctccntacncacatcgcccggntagnctctcctacacancgctgactttcanaaggagctgctctcctcacaccttggacgccgccggaagctncaaaccgcgccgcactaacgccgccgacatgtttccgagccccgcccacacgcggngagctacttccgccctggcggagttcgctcctcggcagaaactggagcaggagctcagggttccgcagcnagcggaagtgctgccttagaacgcangctcaatggctttcctatanccccggaggancggggagctaggggcngtgtccnaagcgcanaaagccacagttgttcaattttctaagcaacaggnctctggtgatccaggcttgtgg

SEQ ID NO: 852 - DNA, 356 bp, Homo sapiens
  misc_feature (1)...(356): n = A,T,C or G
caaatccggagattgccaggaggcttctcctcanaggtgctaatcccaatttgaaagatggaactggttttgctgtcattcatgatgctgccagagcaggtttcctggacactgtacaggctttgctggagttccaggctgatgttaacattgaagataatgaagggaacctgcccttgcacttggctgccaaagaaggccacctccctgtggtggagttccttatgaagcacacagcctgcaatgtggggcatcggaaccataagggggacacccgccttcgacttggccaggttntatggaagaaatgaggtcatttagcctgatggaggcaaatggggttgggggagccacaa

SEQ ID NO: 853 - DNA, 220 bp, Homo sapiens
tgaggtgggaccccgggggtagagctcaagtccccaggcttggcagcaagcaccgttagctgcagcatgtcatggtttagtggcctcctggttcccaaagtggatgaacggaaaacagcttggggggaacgcaatgggcagaagcgcccacgccacgcgaatcgagccagtggcttctgcgcacctcgctacatgagctgcctcattaataaaaaaagaa

SEQ ID NO: 854 - DNA, 179 bp, Homo sapiens
  misc_feature (1)...(179): n = A,T,C or G
cggggcactgcaagatggctcacnagataatactnaactgctttgatgtgacccttgccccttcattnacanacngggggtcctttanactcccagccctgggcacacacaccactcactgaacaccccagnctgaatagnttattttctcantagncaccagagggtgtgttcacttg

SEQ ID NO: 855 - DNA, 104 bp, Homo sapiens
gactgagagtcactgttcattttatttcaaaatcggagcatgttcgtcatggagacagatgttctcggttgcacaataaaccaacctttagccagaccattgtg

SEQ ID NO: 856 - DNA, 384 bp, Homo sapiens
  misc_feature (1)...(384): n = A,T,C or G
tgagctcttccccaacgcccctacgccaatgtctccancngncacaaacgtgaatganggactntcncantnctcttcaanatncanangggcnctgngnananntttccagggangagggttatgactgattgcgggacatgccagatggtaccttcttagttcgtgatgcctcaacgaaaatgcagggggattatacattgactttgagganggcnggaattgcctgtatctgcaggatctntaatatgtgatggccctcgttggcacctccntanncncnggcataatctaaaatggngnaccttattacnctctaccaccacaagtctctcgctcagtccaatcccaaactcgaccgngaanctgcgtacccagtctcca

SEQ ID NO: 857 - DNA, 546 bp, Homo sapiens
  misc_feature (1)...(546): n = A,T,C or G
ctgagggtgacacttcccaaatctcctcagtcctgaccccggcatcatgcatcggaccacacggattaaaatcacggagctgaaccctcacctnatgtgtgccctctgtgggggctattttattgatgccaccaccattgtggaatgcttacattccttctgcaaaacctgcatcgtacgctacttggagaccaacaaatactgccccatgtgtgacgtccaggtccataaaactcgaccactgctgagcatcagatcagacaaaaccctccaggacattgtctacaagttggtgcctgggctttttaaagatgaaatgaaacggcgacgggacttctatgcagcataccccctgacagaggtccccaacggctccaacgaggaccgaggcgaggtcctggaacaggagaagggggctctgggtgacgacgagattgtcagtctttccattgagttctacgaaggcgtcagggaccgagaggagaagaagaacctcacggagaatggagatggggacaaggagaagacaggagtgcgattccccta

SEQ ID NO: 858 - DNA, 426 bp, Homo sapiens
  misc_feature (1)...(426): n = A,T,C or G
gactgaggtcttgtccaataaacatgtggctcctgaccacctactacagatatgccagcgcatcggtccgatgctggataaggaggtcccgcccagtatctcaagagtcacttctttgcttggtgcaggaaggcagtctttgctacgaacagcaaaaggtaccttaatttgaagaagtgttgngctttgtattagtagcttacattgcagttgggaagctgtgtaaacaccgtggaaggtttgcagtgccatggactgactatacacttctctgcattagtgnaagatctccgaattttanccatgcgcttgatgggtcctcccntttcanaaaacgtaaaatgttaagcctgaaaagcttgnagttnaacatggggcttggaggttttatcaanggngagtncttaatttttttccattttggaa

SEQ ID NO: 859 - DNA, 478 bp, Homo sapiens
  misc_feature (1)...(478): n = A,T,C or G
ctgaggatccactgaccttganccactccaaagctctctggagtcagaatcagctggcttcctctagccccactccaggatcttttccccagggcactgaaagcctcagcccttggcagatangaaacgtctgggcaagggtnnacaggcacactggcaacctgtgtgagtaangagcgcacactgaactgcccatnncaccaacaccctcctttaccctctcctgntcgctctnggccctattcttgctntgtgtgtggaaagaggttttcactcaagcatnagatggagacacattaccgagnccacacaggagagaagcccttgtcctgtagccctatggtcctcagcgctcncgggatttctctgccatgaccaagcacctgaggacacatgggggctgctccctatcgatgccctctgtgcagggatggctgccctagcctggccttcatgnaggngcacatgcgtgggcact

SEQ ID NO: 860 - DNA, 454 bp, Homo sapiens
  misc_feature (1)...(454): n = A,T,C or G
attgaggaacagaggttacacctgggccccgagaggctctggaaactcctccccaagcacaaaacccaactgtactaagctttttgtgagctatttcagcccagaatggctgtggaatccagagcaatttcaacctttaaaacctcaggaccatcaagaagaattaatnctagtgaaaatngaagatagtagcttttcttgaagtcaganatgtaaacagaatgggagngcccaaatcttgccnggaattatttcgccagcaattcaggaagttttgctatcatgaaacaccctagggccccgagaggctctggggcgactccaggaacttttgccatcagnggnttaatgccagagttgcacacaaaggagcagatcctanaactgttagtgctggagcnagtccctgagcatcctacctgaagagctgaagatanggggttcaacaacatgg

SEQ ID NO: 861 - DNA, 104 bp, Homo sapiens
ggcctctcagccccaagaaagaccgtgtgaatcattgtctaacaatatgtgaaaacattgtggcacagtctctcagaaaacaaagaagaagaagaagaaaaaaa

SEQ ID NO: 862 - DNA, 272 bp, Homo sapiens
  misc_feature (1)...(272): n = A,T,C or G
actgattcggtattctaaagaaatggacccttccttccaaatgagaactgcatatggaccacaggacatctatacagtgaaagctgtgcttctggggctggagagatggcttgaaggttaagagcactggctgctctctcagaggacccaggttcaattcccagaaccacatggaagctcacaactttctgtaactccggttccaggggacccggcgcacatgcaggcaaaacgccaacgctttagaataaaantaattaaaagagaaaaaa

SEQ ID NO: 863 - DNA, 102 bp, Homo sapiens
gactgaggttagattcagaacaagaaagtggacatatccaaggtctcctccaagtgtgggtccaaagctaatatcaagcacaagcctggtgaaaaaaaaaaa

SEQ ID NO: 864 - DNA, 349 bp, Homo sapiens
  misc_feature (1)...(349): n = A,T,C or G
ctctgcacactactgaactggaccgangntatatccaggaaacgcttgtaagtggatcgagctaccactgctgcctcctatgaactgaactgatgatttcctgacaangcagatgggatntactccaaagancaactgctaaacaggnccacttccctggtatcctantaacctttcttttntactcgctctggnggatgatgggctananggaaggttanagcatttaagancctatnanaagagccgggngtggnggcacntgccnttnatcccagnactanggaggcagaggcnggnggatgactgngtttgaggccancctggngtacagagagagtgccaggac

SEQ ID NO: 865 - DNA, 413 bp, Homo sapiens
  misc_feature (1)...(413): n = A,T,C or G
ttatctcaggccggtcctgccccgggggacctgctcctcaacgacatcatggtgnccctggnccnaccttcttncgccagcaggatgggctgctacggggtggctacnaggcacaggaaccgctctgcccggctgtgccaccgaggaaggntgtcccaggcantagctttacctatgtcantgaggacttncggacagagnctcctcccagccccagcagagatgttgaagatccccgggaacatcaggcacacaatgcccacctccgtgggcccccaccaaagctcatccctgtntctggaaagctggagaagccttggntgncctgnaactaactgggcagaccagggctgncctgnanctcacagagatctgtttgcttntgcctcccgagggctaggataaaaggcatt

SEQ ID NO: 866 - DNA, 265 bp, Homo sapiens
  misc_feature (1)...(265): n = A,T,C or G
gactgagattctccaaacacatagataaacacanagatcganaacaccggcataaggagcacatgaaggataaggataaggaccgggaaaagtctaagcatagcaacagtgaacataaagattctgaaaagaaacacaaagagaaagagaaaaccaaacacaaagatggcagctcagaaaaacataaagacaaacataaagacagagacaaggaaagacgaaaggaggaaaagattagagctgctggggatgcaaaaataaaaaa

SEQ ID NO: 867 - DNA, 377 bp, Homo sapiens
gactgagggttcttaaggcccgccccgccccaagccccacccacagcgctggccccgcccaccatgtcgatgaccatcttgcgcaggctctgccgctggcgcttgctgaggttctggaagatgtcgcagttctcttcttgcagcagcttgaatcccacagccaggtggtggttctcaagcacagactcatcgttgtacatcaatgccagctccgaatctgcagagtaccacgtggtaccacctgggtaccaagccccgccccgtgcgcgcccagtctccagttggcttcattttcagactgactagtcccagccccctcctctgccacatcggtgcttcaccaaataaaccaagcatcaggcgcctaaaaaaaaaaa

SEQ ID NO: 868 - DNA, 325 bp, Homo sapiens
  misc_feature (1)...(325): n = A,T,C or G
gaactgagagctcttccctgctcttctggncagccagtgtgtgcagaatgccccacaagattggatttgtagtggtcagctcctctggacatgaagatggcttcagtgcccgagaactaatgatccacgcaccaaccgtcagtgggtggagatcaccaaagtaaggctgggctgaggggtgggcatgagagcgcatctctgagtgaatacatggtgggctttacacctcctggtccaaaaacatgaaatgcatgtctagacagctatatggtatatttcagtgaaaactaaattaaatcattaaaattaaagtacaaaaaaaaaa

SEQ ID NO: 869 - DNA, 257 bp, Homo sapiens
  misc_feature (1)...(257): n = A,T,C or G
gaggttcctgaaggcttcaaaggaaacctgatagaggaggctcaatggccctgagtgaagatgaggctgaggcagaagtgtctgtcaacacaaaggtccnatcctgtggcaagatggaggaanacaggcgttgctgccttccagganctacatnacagctnttcaatgcnttctggaactataactgtactnntcatgcacaggaggntnnacantgnannacttccntgctaccnctgtgatccatgtgaggtgtt

SEQ ID NO: 870 - DNA, 152 bp, Homo sapiens
tgtgtgcacagctgcccacccagtactggacagcatcagcatcattgacactcctgggatcctgtctggggagaagcagcgcatcagccgagatttatttattattatacagtgtactatataataaataaataaatctttaaaaaaaaaaa

SEQ ID NO: 871 - DNA, 395 bp, Homo sapiens
  misc_feature (1)...(395): n = A,T,C or G
acactgcagaggaaacccgaattgcttggttggcattggcgagcacatttggttaggagagatagatgagaatagttttcatagcattgatgatcccaactgtgagaggaggaaaaagaattcctttgtgggcttgactaacctgggagccacctgctacgtcaacacctttctccaggtgtggttcctcaacttggagcttcggcaggcgctgtacttatgccccagcacctgcagtgattacacgaagggagatgggatccatgggggaaaagattatgggcntcagacttgnnnnnancatnttaaaaacttgttagctttgttgcaaaacaagtaacaanacgatacatnggatccttcaggatttgttaaagccttgggcttagatactg

SEQ ID NO: 872 - DNA, 475 bp, Homo sapiens
  misc_feature (1)...(475): n = A,T,C or G
tattggttaccgtcagagctagantcccatcactgtccttcaaaatgcaatggaatgtaccacggactatgtctcggctggcactcaggacattcgtggaagcacagaaagccaggctctttgatcaccattggcgcataaaagggccgttacttgtgcatagaggtgaatacagagttggcttggacaccacaccttcgaaagcagnggctacatttatctgctgntcagtgccttgcanagnaaaggaatctcttaaatgctcaagccgcgctaagttggggacccttgcgccaggaaacgaagggagnngnacattttattccaanagggtttttatcttccagntccacatcccagganactncatcagaaaangaaggnagaaaccnggacnctttacaanacaacttctatcaggnctgtatcaaccggtntaagaaagacatttagacaattatgggaaaagttggta

SEQ ID NO: 873 - DNA, 487 bp, Homo sapiens
gactgagataccattaacaaggacactaaggttcccaacgcctgcttgttcaccatcaacaaagaagaccacactctggggaacatcattaaatcgcagctgttgaaggacccgcaggtgctgtttgctggctacaaagtccctcaccccttggagcacaagatcatcattcgtgtgcagaccaccccagactacagtccccaggaggctttcaccaacgccatcacagacctcatcagcgagctctcccttctggaggagcgattccgggtggccatcaaggacaagcaagaaggaattgagtagcagctgaaagaagcgttgcttagtggctggaaggctggcacatactcctcagggcccttcagtttaccacatggcgacagccactctcagctctctagctgggcacggggctctgccccattctgtacatagactgttgttttcctaataaaagcagagcagaaaatgggaaaaaaaaaaa

SEQ ID NO: 874 - DNA, 455 bp, Homo sapiens
  misc_feature (1)...(455): n = A,T,C or G
gctggaattacagtttcccaccgttcgtggctcagattgggtttttgaagttgatcaaggagccacggcctncagcacagccctactgccagcaccatcagaggttctgaaccaccccgggaacgctcaattggggatgtcaccacggcaccatcagagcctctccatcgcccagatgaccacaatttgaccaacttaatcattgaacatggcggtaagccatctnggaaggccttcccagtcctggacattgactaccctcacgtgcgcacaccctttgagatctccctctggattctcctggcctgcctcatgaagataggtaccgagcctgctggcttgccgaagcctcctgcagtcctgcactgaagaaccatctnctccctccaagctgcttttnttttccttttgcctttttcnaaanatcnattttattttatatatatgaagcatcc

SEQ ID NO: 875 - DNA, 514 bp, Homo sapiens
  misc_feature (1)...(514): n = A,T,C or G
agaccagtgtctcttcaccagcacccagngtaaggtctgctgngccatgctgatttctgagtctcagaagctggcgcattaccaggtaggcaatttctactgtcttcgtgcgcttaccttccaggcccagcactaaggcctcgctgcttctgccttacacagtanaagctccttgcacagntaccagatgtttccttcatacgtgtttgctagggctngaaattgacttagtttctgtgactgncatctngcccatgcaagacagtatcgttgnatgcanatcttgccggacaacgtgatgcantaggaagtntgagctttggctttacctanaccagaatttgaagccaaccccgttattcattgnaggcaagaaatttcaccatacttggccttagcttcatcttgtacacaatancagtgttntcatagattgtnggaggctaaatttaatagcatgtaaagggcctagcacatggtagggactcaataaataaagttttcttcccccaca

SEQ ID NO: 876 - DNA, 157 bp, Homo sapiens
  misc_feature (1)...(157): n = A,T,C or G
atgtgttcttataagcacacacagnggctcacacctgtnggcccgttcttgggaagnagaggtgggaagattgctgtanntnganaccaacctgggctaagnacattanagggaccctcctttaaaaggggaanntatnttcctcattggaagaaca

SEQ ID NO: 877 - DNA, 444 bp, Homo sapiens
gactgagcttcctcattgttctggtctgcctcatcttcagtgtcctgtccactattgagcagtatgccgctctggccaccgggaccctcttctggatgaggacccatggaagacttctgaagccgatcacccatggagctcctattaaaagaaaggacatgcatgccttacactattgagacagatgtgggtgttctctgatccgaacttactgcaagggctgctagtgtttgcctggcatacatgaatccctgggttcaatctccagtctgtataaactgtgcacagtgtacacacctgtgatcctagtgctgggagatgaagagagagaggagcactggaaggtcaaggttatccttggctacatagagtttgaggtcagcccaggctccatgagactctgccccagcaatagcaacaacaacaataacaaaaataaataaa

SEQ ID NO: 878 - DNA, 508 bp, Homo sapiens
  misc_feature (1)...(508): n = A,T,C or G
gaactgaggccctgancttnatcatcttcttngcttcacggcctccatctctgcctacatggctgcagcgntgctagagttcctcatcacactggccttcctcttcctctacgccacgcagtactaccagcgcttcgataggctcaactggccttgtctggacttcctccggtgtctcagcgccatcgtgcatcttcctggtggtctcctttgctgctgtgacctcgagggagggagctgccattgctgcttttgtttttggcatcatcctggtctccgtctttgcctatgatgcattcaagatctaccgaactgagctgatgcccagtaccactgagggggaccagcagtgattccagggttacctggctcccacgaccagacacaaggaaccgnggagcccatctttgtcatctttgaattcaccgaaccccaagtacccaccatctatattccacgttttcaganatgngcgcttganaagncccaggcacctgggggaactggg

SEQ ID NO: 879 - DNA, 424 bp, Homo sapiens
  misc_feature (1)...(424): n = A,T,C or G
gactgagttttaagctataacattaatcatgagtgaccaaatcaaattcatcgtggacagcctcaataaggagccttttaagaagaattataacttaatcacatttgattctttgggaccaatgcanctattgcaagttctcaatgatgtcctggctgagattgaccccaagcannatgttcatatcagagnggnnatgccagagcagacngccaaacgactgatgaatcttcttggtntccttncgnacaaacctccgggaaatgccacngacatgagcnccttccgtcangncttggtgattggaagtaaacctgtnattaacccagngctccactggcttcttcagcggagtantgaactaaagaaaagggnntatttagctngtttcttaataaaaccggaggtgccaagtgagtttctt

SEQ ID NO: 880 - DNA, 310 bp, Homo sapiens
  misc_feature (1)...(310): n = A,T,C or G
gactgaggtacaccaggggttggaaaaccacactaggcaaagaacttgcatcaagatcaggcctgaagtacgttaacgtgggagatctagctcgagaagggcanttatacgacagctacgatgangantatngntgncccatnctaaanaaggatagggatgcacnatnagttngancatctcctgcaggatnggcgggattgnttgtngattacccacggagtganacttcttnnccnancgctgggnctatntantggtnagcagtcagtgancagatgatggtgtattgtataacacgacttgctac

SEQ ID NO: 881 - DNA, 353 bp, Homo sapiens
  misc_feature (1)...(353): n = A,T,C or G
gactgagggaaagtcatggaggcttcaggatcttcttcccagtctcaagacagtggtggagtccacagggaaacggaagatcactgnnccgaccatggggancacggaanatnaagggaangcccntgagcnatatannanagacaagtcttcctcttcatcctcatnctcntcatcttcttcctcctcttcctcctcatcttcttcctcctcctcagacagcagcnatgaggaccagccctccnnaggtcccagganacacanaaggaggccccncagggacagcttgcgtggtgccgaccatggggaactggaagtgctaaaggacgagcttcagctctgcggaggtggtg

SEQ ID NO: 882 - DNA, 535 bp, Homo sapiens
  misc_feature (1)...(535): n = A,T,C or G
actgaggatccttccttgatgacctcgagtctatggaggagtccatgtctcggagcctgggcaagcctgccnagtcctcgaagcagnacctgctggcagntcatcctcgnaatatgaggcgctggatcgggagcttccgtgtatcacnaaaattctcanaaccnccctctgcccancccctctgcctttgcatggagacttaggaagactttacacacgtggaggcgctgcaggctttggaggtcganctgnccggngncatggaaagcgggcgcgttaacagtattcgctacganaatatgaatgtcatctgnggnactgcgggccgnagggacaggnggctnatcaccgtcacagacttccagacgcggtcacgcctgctgcgctccgggctcaccctccgtggaaccgngtacccactggtgcgccacgacgatttactgctgggggactaccgtttgcacctgcgccgctctntggnncnaaaggcgcatgctcgaagccctcggggnggagcctgccgacgaagattgac

SEQ ID NO: 883 - DNA, 353 bp, Homo sapiens
  misc_feature (1)...(353): n = A,T,C or G
gactgagactcccttaggtgctaatcatttaactgcaagcatgagtggattaagtctgcatccagagggactaagagttgtcaatcttcttcaagaaaggaacatgcttccttccacaccactgcagcctccagtcccaaatctgcttgaagacatccagaaactcaactgtaacccagagttgttccgatgcacgctgacgagtgtccctcagactcaggccttactgaataaagccaagcttcctctggggctgctgctccaccccttcaaggacctagtgcagtngcccgtggncacctccancacanttgggagangccgntnatgcaggacttacattaaccctttcg

SEQ ID NO: 884 - DNA, 348 bp, Homo sapiens
  misc_feature (1)...(348): n = A,T,C or G
tctgagccttctggccggggctccccgggncctcgctgtgggtgatgactataccaaccggactggtgctgtgtacctgtgtcccctcacggcccacaaggacgactgtgaacggatggacatttcagagaaaagtgagacgagcctgagggcagagctaagtcgggagcctggcagagggggcccaaaggggagatacgaggttagcttgttagggaggcaacatttgaagctaaggggaaaagacagcgagatcaaggctagatctactatgggctacatagtgggttgcagaatagcttgagatgtaaaatggagatcctggctcaaaaagcaaaacaaaacaaa

SEQ ID NO: 885 - DNA, 365 bp, Homo sapiens
  misc_feature (1)...(365): n = A,T,C or G
gactgagatttgccgagaggctgagttctctataggaacacccacatttgtatggatgagtggggaaagatagctgcagcagacaaggaaaaagcgtcctgacctcccgagaacatgagtatgctaaaacccagcggcctgaaggcccctaccaagatccttaagccgggaagcacagccttgaagacgcctgctgctgctgcagatccagnggagaagacaatacccagtgagaaagcctcgggccctccatcctctnagaangntgatgaaaatgataaattttnctctggagtagaanaaantgggagtgatgagccagccttcgtgtattacatgaatgatggtgtttatggttcttttgc

SEQ ID NO: 886 - DNA, 165 bp, Homo sapiens
gaggacctgaaccaggccccccaaccccaagcagatgaggggcctccaggccgctccatcggggggatctcacccaacctgggtgccttggacttgctaggcccagccactggctgtctgctggacgatggactggagggcctgtttgaggacatcgatacctcc

SEQ ID NO: 887 - DNA, 230 bp, Homo sapiens
  misc_feature (1)...(230): n = A,T,C or G
ctgggagtgtggcaggaagaagagctactgnatgcatggctacattagggnnngaaaatgagttgngtnaacactaagaccagggtgcctttcngaaggaagatcttnaactaaatatgaatgagggnnnnaantttttttgtaattataaatgggagaanaaaatttatgaaatgtntgtcatnagcacattgattataaatgtctttctgtnggaaaaaaaaccattg

SEQ ID NO: 888 - DNA, 218 bp, Homo sapiens
  misc_feature (1)...(218): n = A,T,C or G
ggtgcaagcgtctcctgatgaaatgtattgtgccccactgggctccaaaggcagnatctggcgctgttgatgcccttgttggaactttccagagtcctaagccccccatgctgtaaatagtctggtcgtcagagtagggaggagcccgggcttctgtttatgtatgtatttatttatttattatttatttattacacctaataataaaaaggtgctca

SEQ ID NO: 889 - DNA, 427 bp, Homo sapiens
  misc_feature (1)...(427): n = A,T,C or G
gactgagctcggattgggaaaatgaacggaggaagcaagatgaagggcagntntgtnccctgtgcatccgtcccctggcaggatcggancaggagatnantanncatgtgnagcactgcctggctaagagggaaggctcctgcatggctnaagatgatgctgtggacatngagcatgcggacagcanccgctttgaggaatatgagtggtgtgggcngaagcgnatacgggccnccacactcctggaaggtgnnttcccaggtataaagcnnntganaacttgggtggtggnactcnggnnaccaggccacttctgggancnggacannntttccaccacgngggagctcttgctcgtggggctcctttgngaccgngctgcccgcctgtgatgtgcatattaaagnggntgtatttgggtggggaa

SEQ ID NO: 890 - DNA, 452 bp, Homo sapiens
  misc_feature (1)...(452): n = A,T,C or G
gaactgagggatagcgtggcccagtcgtcttctttgtggactatgcagtctaactgcttatatatggaagaaatcgaagactcggtgactgttcgggattatatccaatccactatggagactgaaanggacccccagngcctcttggacctggccaggaggatggngcnggttcttggccggaatgcacgancaagacctcattcacggggacctcaccacctccaacatgctcctgaggcggcccctggcgcagctgcacatcgtgctcatcgactttgggctgagctttgtctcaggactgccggaagataaaggcgtcgacctctatgtcctggagaaggccttcctcagcacgcacccccacaccgagaccgagtttgaagcctttctgaagagttacggggcctcgtccaagaagtccagtccagngctgaagaagttagatgagg

SEQ ID NO: 891 - DNA, 466 bp, Homo sapiens
actgaggtcccttaggaggaaccccttgagctcccggtctaaaacacgttatcgccagtgtgagggctaaatggtgtgataacacccaagagccaggaaatggcaacagccttggagccagaggaccaagatctttgggaagaagaaggagttctgatggtgaaactggaggatgatttcacgtgcgggccagaatccgccttggagggcgatgatcctgtactggagacctctcaccagaacttccgacgctttcgataccaggaagcatcaagccctcgagaagctctcatcagacttcgagagctttgtcatcagtggctgaggccagagaggagaactaaggagcagattcttgagctgctcgtgttggagcagttcctcactgtcctgcctggagaactgcagagctgggtgcgaggccagcggcccgagagtggcgaggaggcagtgacgctggtggagg

SEQ ID NO: 892 - DNA, 162 bp, Homo sapiens
  misc_feature (1)...(162): n = A,T,C or G
tgcaccatacatccgagagtttcgaggaccctccganatgctcactcctanancaagagcagaaacccgggaagaacgcatggagagaaagagacgggaaaaaannggcggcgacagcaggaagtggagacagagctgaaaangtgggaccctcacaatgat

SEQ ID NO: 893 - DNA, 380 bp, Homo sapiens
  misc_feature (1)...(380): n = A,T,C or G
gactgagtttgtgaagtgtggatatgcaggctctaattttccagaacacatcttcccagctttggttggaagacctattatcagatcanccaccaaagtgggaaacattgaaatcaaggaccttatggttggtgatgaggcaagtganctgcgttccatgttggaagtgaactaccccatggagaatggcatctgtgcggaattgggatgacatgaagcacctgtgggactacacatttggaccagagaaactcaatatagacnccagaagctgnaagantttacttacagaacctcccatgaatccaaccaaaaacagagaaaagattgtnnaggaatggttgaaacttaccanntttttggggtgtttgaacccttca

SEQ ID NO: 894 - DNA, 314 bp, Homo sapiens
  misc_feature (1)...(314): n = A,T,C or G
gctaaacctctaaatgtggncgcacatnctcaattaaanggttanngtttnttnnatanntgnccttgggcagttactatgagctacaggntctgcctcatctagtcctccgcatacagcggggagggtgagacttggggatgcgcccacctcaggcccatgcatcaccagatgggctctcacatgaccattacacacactgatggtgacactgtatcagaaagccactcagctttgccttttaactaaatctggacctgcttgccacaactatgtaacgnaagcctctaactactaatttctgaagagaagct

SEQ ID NO: 895 - DNA, 315 bp, Homo sapiens
  misc_feature (1)...(315): n = A,T,C or G
actgagagaagaatggagggcagtggaaagctcgcatggtagaggatgctgtggagtaccatctcttcctgataccagataaagccagaggcacagaagagcacagagagattcttcagaagtacatttgaacggataatgacccagttngnacccatactgggancctttatatctggcagaatcagcctttcaatctcaaatacaagcctgcaaaagggaggtgttcctgctcatatgtacggnatgacaaagttttggagataacattgaggatgaatgggcntattgtttatgtaataaaggcagattaca

SEQ ID NO: 896 - DNA, 278 bp, Homo sapiens
  misc_feature (1)...(278): n = A,T,C or G
gactgagatgctgtcacatctggagctgactcttcaggcatccaancaaaatggcacggagacccaggaggtgttcctggtcctcgtttcgaacaaaaatgtcttcgtgaagttccaggccccggaaatnccattgcacttggcctacgactccagcctggtcatcttncaaggacagccaanagtnaacatcacagtgctaccatcccttacctccaggaaacagatcctcgactgggcagccaccaagggcgccatcacctcgatagcagcactgg

SEQ ID NO: 897 - DNA, 409 bp, Homo sapiens
  misc_feature (1)...(409): n = A,T,C or G
gactgaggtccaagcatggaaagtcataaaccangnactagcaaagatgatttaatacttaatatcatatccagaaaaattaaacaacttccagantcagacaggaatctgcttgaatatggatcancatatatnggacttaatgctgcttttgggggcctaataccanacagtctatttcggcgaatcttgaacgngacacaagctcgattagcttctagcttaccaatggctgtgatcccatttttgacagcaaacctgtcctaccaaagtcttgtaagtttacctttgagtacaggtgatttgaactgtgaaacctgtaccacaacacggggtgcactagttggtttggttatgggtggtctgtaccctatcctttnggctatacccgnnaatgggggccttgctg

SEQ ID NO: 898 - DNA, 489 bp, Homo sapiens
  misc_feature (1)...(489): n = A,T,C or G
gaactgagtgcccaagatgtatgcagtgtgatgccaagtttgacttcatcaccagaaagcatcactgccgccgctgtgggaagtgcttctgcgacaggtgctgcagccagaaggtgccacttcggcgcatgtgcttcgtggacccagtgcgccagtgtgctgactgtgccctggtgtcccaccgagaggcggagttttatgacaagcagctgaaggtgctcctaagtggagctaccttccttgttacttttggggactcagagaagcccgagaccatggtttgtcgtctttccaacaaccagaggtgcttggttctggatggggacagtcatcgtgaaatcgagattgcacatgtctgtactgttcagattctcacagaaggcttcactcctggagcaggcancacccgagccantggcatgctcctgcagnacacagtgccaggggcagaggctgcagcacagctgangctgatggcccggagaggac

SEQ ID NO: 899 - DNA, 292 bp, Homo sapiens
  misc_feature (1)...(292): n = A,T,C or G
gactgaggctgactcatgccgatctggctgaagcctggctgntcctgctaggtcgtcgtgccactactactgctatcccgacgctactgaactggactgctagtatattcatgaagtgttttcaagtggatccagctgccgntactgaccagtgaactgaactgctgatttcctgacaacacagatgagatttgctccaaagaaccatttctaaacagggccacnncctccatatcctaatagcctttcttttctacctttggngggtggtgctctataagggagggtaaac

SEQ ID NO: 900 - DNA, 147 bp, Homo sapiens
  misc_feature (1)...(147): n = A,T,C or G
gggagaccttctggtagttctgttctgggncccttanccagagttccaccagccacaccggtggntcgaatgtntgagcagagnaacgtgaactccgagcctgaggaggaggaaggaggcctggaagatgaagatggagatgatgat

SEQ ID NO: 901 - DNA, 487 bp, Homo sapiens
gaactgagagggttccccttgcaagcatatccaggcggcccttgtcccaccattgcataatataagctacatcgtggatatgatctaggtcctcggagtgtctgttctcatgctctggaccagactgagaatagaaaggagcctggctatctgagagatcctgtcctgcaactggctgttctggggctagaggatgtggacgtgaccatggactacactggtatatatttggtagaggacagctctgctgaaaaatattctactgtgcacaagaactctcaaaagaaagttatctggggctggaacattggcagctaagagcactgactgttcttcggaggtcctgagttcaattcccagcaaccacatggtggttcacaaccatccgtaatgggatctgatgccctcttctggtgtgtctgaagacagcaacagtgcactcacatgtatatgtaaaataaataaatacatctttaaaacaaacaaa

SEQ ID NO: 902 - DNA, 132 bp, Homo sapiens
gactgaggtgtgcgccttgaccgagttcgaggaggccgccagaagtacaagcgacggctggattcggagaacagcccctacctgaacctgccgatttccccacctgctaaaaagccattgaaaataaaaaaa

SEQ ID NO: 903 - DNA, 486 bp, Homo sapiens
  misc_feature (1)...(486): n = A,T,C or G
gactgagcctagtcattgttggctacgagcaatggtaatacaattatcactcagcttgactactcttctggacaagttctcaaatatttctgaaggcttgagtaattactccatcatagacaaacttgggaaaatagtggatgacctcgtgttatgcatggaagaaaacgcaccgaagaatataaaagaatctccgaagaggccagaaactagatcctttactcctgaagaattctttagtattttcaatagatccattgatgcctttaaggactttatggtggcatctgacactagtgactgtgtgctctcttcaacattaggtcccgagaaagggaaggcantcaaggnntcnntggantactgnnnacagtgagatggaacnntnntanncttnccctgctggatgancngaatgtgtngctanngaaagaantngngggactttntgctacaaaggtctncgcnggctcgggactgtcctta

SEQ ID NO: 904 - DNA, 174 bp, Homo sapiens
  misc_feature (1)...(174): n = A,T,C or G
gactccacaggaggcctacanacagngggctantccagccacgctctangaaccatnacaaaccnttnctctttataagaaattggctcangcattaccgatgaaaagctgtgtaacacaggctttgaggcataaaaccgatttctattaaatgtagaaacaaaatgaaaaaaa

SEQ ID NO: 905 - DNA, 339 bp, Homo sapiens
  misc_feature (1)...(339): n = A,T,C or G
gactgaggtgacagtacaganaagtaccacaaacgttatccaggcanctgactgacatggtgagacagcttgtagacgatgtcaagagccttnaaacgcanagacccaacttgngatctggacaggacaatgcacaaggcaccccacccacggctggnnagatggctcagcgattannancactaactgctnttctgaaggtcctgagttcaaatcccaacaaccacatggtagttcacaaccattcctaatganatcagatgcactcttctggtgtgtctgaagacagctacaatgtattcacatataataaataaataaatctttaaaaaaataaaa

SEQ ID NO: 906 - DNA, 531 bp, Homo sapiens
gactgaggttttaatgtggaaacagtagaatataagaacatttgtttcacagtatgggatgttggtggtcaagataaaattaggcctctctggaggcattacttccagaatacccagggtctcatttttgtggtagatagcaatgatcgtgaaagaatccaggaaggagcagctgtgctgcagaaaatgcttctggaagatgagctgcaggatgcagtgctgctcctttttgcaaacaaacaggatctgccaaacgctatggccatcagtgagatgacagacaagctaggtctgcagtctctccgaaacagaacatggtatgtccaagccacttgtgctacacaaggaactggtctgtatgagggactggattggctgtcaaatgaactttcaaaacgttaaatgaagctggatatctaaccaaggacatgtttgatagaattggtctaggcttgttacaacaaaattagtttgcatcttggttattaaaggatatctgagacaggtttgggcagaaattacagcgtttaa

SEQ ID NO: 907 - DNA, 158 bp, Homo sapiens
gactgagttatatccgactttatgggagaaaatttagcaaagaagatcatgttctttttattaagttactgtatgagctggtatcaattccaaaactagaaatcagcatgatgcagggatttgcccgtctcttgatcaacttgttaaaaaaaaaggaa

SEQ ID NO: 908 - DNA, 398 bp, Homo sapiens
  misc_feature (1)...(398): n = A,T,C or G
cctcctgggctggggttcgctgctcatcatgctcaagtccgagggcttttactcctacctgtgtacgaagccaggtganatgggcgcctnnntcgggngcaggtttctggagtggntctttgggagagggctgctnggtggtgaanacgtaanccagntatgcctgcttgctgaacagtgcctctangtgccnnanngnccattntgatcctnanccngctatctgtgtgcntnnnatnatcatngtccctgtttggggntggngaaactgaggctgggaccantcttccnttntgcccangctgtgagactaatagactaatagactcctgcgtgcngncangaacgttgntggccttntgntcttccagggcctgcancattgcttgccttgcaaa

SEQ ID NO: 909 - DNA, 228 bp, Homo sapiens
  misc_feature (1)...(228): n = A,T,C or G
ctcacagccacccatagaccanttncaatgagaggcatctgacccagcaggaaacgaggcctgctnaacagagccttggatatggacgatanggattacagtgaggcccgatggcctgtcngataagnaccacccccagtaaggcccagnaagtcncctcnagaagaattgccaangaangtttcaannagtagccntatgccngngtcacccttgcttcgaaggctt

SEQ ID NO: 910 - DNA, 253 bp, Homo sapiens
  misc_feature (1)...(253): n = A,T,C or G
gactgagattttcagaatgatcaactagntgaaatatctccattgggtactgaggaagtctcagcagttagccaagcgtggtttacaactaaagaagataaggattctctcactaacaaaggacataaatggaagcaggggatgtggtccaaggaagaaattgatattttaatgaacaacatcgagcgctatctgaaggctcgcggaataaaagatgctacagaaatcatctttgagatgtcaaaaaaaaaaa

SEQ ID NO: 911 - DNA, 371 bp, Homo sapiens
  misc_feature (1)...(371): n = A,T,C or G
gactgagactaaaatgtcaaaaagaaaatggctctgttagcccaacagttacccagacggttcaactcagttaagttgactagcttcattaaagccaaacaagtcaccaaacgctctgcaagagcaggaaaagccgtgttgcccggcttctcagctcagcctctgctctcctctgacacgagctttctccggcggggaattaagacttacaggactttgttctggaatcgtttccattctgccagcacaaataggacaaagagttctgcccgaaagcactctgcttccttcagnggntgaacagcagggagaggatncttagtcttgaatcanagcttgccttttggaagaagnggacgacctgcctccat

SEQ ID NO: 912 - DNA, 434 bp, Homo sapiens
  misc_feature (1)...(434): n = A,T,C or G
ctgaggcacaacccggtctcccagaanaggagaagtgcctggcgtggattacagctttctgactgtgaaggagttcttggacctcgagcagagcgggaccctgttggaagtcggcacctatgaaggaaactattatgggacacccaaacctcccagccagccagtcagtgggaaagtgatcacgacggatgccttgcacagcctgcagtctggctccaaacagtcgacccctaagcgaacaaagtcctacaatgatatgcaaaatgctggcatagtccacccggagaatgaggaggaggaggatgtccctgaaatgaacagtannntttacagccgactntggagaccaggacgagccacntctccaagaagcaccgcntcccacctgtgaatagtagcatcctcgcttgntcccatcacgggaccctttttaa

SEQ ID NO: 913 - DNA, 221 bp, Homo sapiens
  misc_feature (1)...(221): n = A,T,C or G
atggatactacaatggtgaatttgtggactctgtttgagcagcttgtgcgccggatggagattatcaatgaaggaaatgaaagcattgaattcatccaggttgngaaggacttcgaggacttccnaaagaagtatcaaangacccaaccaggagctggagaaattnaaagacctattgttgaangcagagactgngctggaaccgccctggacgttaaagc

SEQ ID NO: 914 - DNA, 337 bp, Homo sapiens
  misc_feature (1)...(337): n = A,T,C or G
gatgacgtccatatcttntcgnaagagagggaatcagaaggtacttnngggagaatagtgatgcagctttncaccntcacngcaatgagaggattctgaggccttctgagnggaatcagagataccttgccaagtaatatgtaccagaaaaatggcttacatcatgggaaatacgcagtgaagaaatcacggnnaactgatgtggaagaccttactccaaaccctaaaaaactacttcagattggtaatgagctgcgcaagctgaataaggtgatcagtgacctgactccagttagtgagcttcccttaacagcaaggccaaggtcaaaaaaaaaaa

SEQ ID NO: 915 - DNA, 173 bp, Homo sapiens
gactgagagctctgcacatcgagagacttaaaaccacctgagatcatcagacaagtcacatacatgggactttttgaattattgccattttgtatttttatcatgttatgtgtaaaagacagtgcctattctgtgttttactgaatcaaattgacaatgtcagaaaaaaaaaa

SEQ ID NO: 916 - DNA, 164 bp, Homo sapiens
  misc_feature (1)...(164): n = A,T,C or G
atcttcctgctccagcctcttgaatggaatgctgtacatagactccagaccagctcagctacttcctcctatgctcttgacacaaatgaacactgaccacaaatttctatttgtacaatctgtggatgtnccaaaataaaggaattggagctgaaaaaaaaaaa

SEQ ID NO: 917 - DNA, 105 bp, Homo sapiens
ttttttccactattattgcatgcagattaaaacgttaagagcttttctttccccttaaaaattctgaattatgaaaataaacatttcaaatttcaaaaaaaaaaa

SEQ ID NO: 918 - DNA, 203 bp, Homo sapiens
  misc_feature (1)...(203): n = A,T,C or G
cacagactgagttttaaggacttcctgagctgttntgagttgttnacttatggatcttcactgcaagatggactgttccaatctcagaggaactcttccagaaacctgtatagactactttggccttgaactcctacaggtggncctgcctttgcttcctagnggctgggattaaaggtgtgtatcaccaaagagaaaaaaca

SEQ ID NO: 919 - DNA, 407 bp, Homo sapiens
  misc_feature (1)...(407): n = A,T,C or G
atactgattctctgatttcccagtaatgccactcagttgccaatatcaagcaagcgcatataagacacttgtaatcttttaagaaaagtagtacttctcttcacagtatctggcggatcaacactggagggtgaggtgtcagcttccagaaagatcatcatgaagttatatgtgtttctggttaacaccggaaccacgctgacatttgacactgagctaactgtgcaaactgtggctgatnttaagcatgccattcaaagcaaatacaagattgctattcagcaccaggttctggtggtcaatggaggagaatgcatggctgcagatcgaagagtgtgtacttacagcgctgggacggacacaaatccaatttttctttttaataacagaaatgatcttattgaaag

SEQ ID NO: 920 - DNA, 179 bp, Homo sapiens
  misc_feature (1)...(179): n = A,T,C or G
gactgagataaaatcaaagacaaaattaaagagaaagacaaagagagaagaagaaaaagaagcatggnngtnatgannngagatcaagaaagaaaatggagatgtaaagattttactgaaaagtgggaaggagaaaccaaaaacaaatatagaagacttacaaattaaaaaagtaaaaa

SEQ ID NO: 921 - DNA, 219 bp, Homo sapiens
  misc_feature (1)...(219): n = A,T,C or G
cgttgaaacatgcccgtccttcaccanactgagcttccacagcgcggtggttggtacaggactctccgtgagactgatgctctatacacangagaaacngctgtcttcanancaaacacaaacaaanganagttttctttccttcctattggcgcaatccatacttattncaggaaattccttaagacgtntagatgtaaaatacaaaactgtgcacaa

SEQ ID NO: 922 - DNA, 750 bp, Homo sapiens
  misc_feature (1)...(750): n = A,T,C or G
gcttacaggtggtgcagaaagaagtctggtcacaactggctacagtgaacgagctgggtaccccaaggacatcttaccagttccagccaaagatctgatctacgtacacctgcgtcatgctgagaccctcaagcctcactaaaagggtccctgcctagttctgtttactaatctgccttattctgttgttgttcccatgttaaagatagagtaaatgcagtattctccacatagagatatagacttctgaaattctaagattagaattacttacaagaagaagtggggaatgaagaatgaaaaattactggcctcttgtgagaacatgaactttcacctcggagcccaccccctcccatctggaaaacatacttgagaaaaaacattttctggaacaaccacagaatgtttcaacaggccagatgtattgccaaacacaggatatgactctttggttgagtaaatttgtggttgttaaacttnccctattcccttcccattcccccttccagtttgngggntttttcctttaaaaagcttggggaaaaatttttaagtccgtcgtcgagactcctctaccctgtgcttaaaggggtattgaagtttcgacccccanagctnttggnctgnggnggctttcatggttggctggntttattttcaaacccccaanaacttttgggccnnggggggcttttaatgnttgcctanctttaattaaatcttaccctttttacaatttttaaaaaa

SEQ ID NO: 923 - DNA, 218 bp, Homo sapiens
agtcatgcaggaaaacctcagcatttgcttcatcaggagatgacgttaaaatatgggatgcttcgttcctgacattggtggataaattcaaccctcacacgtcaccgcatggaatcagttcaatctgttggagcagcaatagtatcctttaaaaaaaagtaatcactttttgttagttttcaatgatctgtgcaactgttggcccataaaaaaaaata

SEQ ID NO: 924 - DNA, 223 bp, Homo sapiens
  misc_feature (1)...(223): n = A,T,C or G
gactgagggtcccttacantcccttaaaaatccattctcccttccttgctccttgcagcagtaacatgtatgagtaccatgcaccaactgatcgtgccattggagctccttaaacagtaatcacaaccaagctaggggaacatttgtatccgataaaggggtgggagtgcaggttttaggcactcctttgggagaacaaagaaattaatgtaaataaaaaaaa

SEQ ID NO: 925 - DNA, 222 bp, Homo sapiens
  misc_feature (1)...(222): n = A,T,C or G
aattgtctcttgagttccactgggaatgcccagtctggggctgtgagaaacactgtatcaaagagatcccggctcagcacctgagacacaggcatgaggcctgcaatgggacagagcaaccggaactcctaaagactgtcttccaaagttgtgctgggccttttgnggggaggaacatgactgtgtcatggggaaaatgcatacatctgtttttacttaaca

SEQ ID NO: 926 - DNA, 380 bp, Homo sapiens
  misc_feature (1)...(380): n = A,T,C or G
actgaggtagcccagagctcgagagctggcttcctgaccatcagacaagcttcgccaaaagtcttcacctaagcaaacaggagaaagaagggnttctntgtgnnnccccgnctgtnctggntctgactctgtacgaccgncacaccnagctggccttgaacttaanaganctgcctgcctctgtnctgactgctggnatggaagggatgtgccactactgagagcttgttttagtgcttacancttgctntgctgctaagccagatgccctgagtgtgatnctctagaatgacaaggtgngagagaaccaattccccannttatcctcacacccacacatgagntgcgncaagtgctcccacctctgacaataaaaaaaa

SEQ ID NO: 927 - DNA, 149 bp, Homo sapiens
  misc_feature (1)...(149): n = A,T,C or G
aggactgaggtaaaatcaaagacaaaattaaagcagnanagcacaaanagtagaagaagaaaaagatgcataangtaatgantngagatcaagaaagaaaatggagatgtaaagattttactgaaaagtgggaaggagaaaccaaaaac

SEQ ID NO: 928 - DNA, 126 bp, Homo sapiens
  misc_feature (1)...(126): n = A,T,C or G
gtctcgggctggtgagtanggctcagtgggtaagagcanncgactgctnttccgaaggtncgaagttcanntcccagcaancacatggctggcgtcacaaccntccgtnncgagatctgacgccct

SEQ ID NO: 929 - DNA, 134 bp, Homo sapiens
atggattttcctgtaaactgcaagataaccgggacaccagtctcactcaatcctttttgccgggaaccccttcctccctattaatgcatgataatgaataataataataagaatttcatctctaaaaaaaaaaa

SEQ ID NO: 930 - DNA, 424 bp, Homo sapiens
  misc_feature (1)...(424): n = A,T,C or G
aactgagcctatcctctactcctatttccgaagctcctgttcatggagagttcgaattgctctggcgttaaaaggcattgactatgagatagtgcccatcancctcataaaggatggcgggcaacagttcactgaggaatttcagaccctgaaccccatgaagcaagtgccagcgctgaaaattgatggaatcaccattgtccagtcactgancatagnnctngaccgngganaaaactctgactnngngncccgttnctnccttagnnacctaacntacgagcnatcnngcgcatganngntnanctcntnnctggtgganngcagncccttngaaacctgtctgtcctgaagcaagtggcacaggagaaccagatgcaatgggcccaaanggtattacttccggntttaacgctctggaaaa

SEQ ID NO: 931 - DNA, 341 bp, Homo sapiens
  misc_feature (1)...(341): n = A,T,C or G
tttcagctcagttacttatggcttcccctaaaattgcttccctctcttggggacaaatgaaagtgcaaggctctacnttaacctataaggattgcaaagtatggccaggaggcagtcgggcttgggactggagggaaacaggaaccgagcattctcctggagagcagccagcagatgnaaaggaagttgctgagaaaggggtacagactcttgtgattggcagaggaatgagngaggccttgaaggtgcctccgtcgattgtggagtacctgganaaacaaggcattgatgtgcgcngtcctccaaacagaagcaggccgngaangagtataatgccttgg

SEQ ID NO: 932 - DNA, 439 bp, Homo sapiens
  misc_feature (1)...(439): n = A,T,C or G
caccacagacttccaggagagctttgtcacgtcaggtgtgttcagtgtcacggagctgatccaagtgtctcggacacctgtggtgaccggaaccggacccaacttctcactggggagagctgcagggtcacctggcatatgacctgaacccggccagcgccggcatgagaaggactctacccagcacctcctccagtgggagcaagcggcacaagtcgggctcgatggaagaggacgtggacacgagccccggcggggactactacacgtcggccaactcacccacgagtagcagccgcaactggacggaagacatagaaggaggcatctcatccccgggtgaanaagacagagatggacaaantctccattnnacagcccgtccccccaggactcccccnggttntccagcttnacacaacaccacaggccggtcatt

SEQ ID NO: 933 - DNA, 469 bp, Homo sapiens
  misc_feature (1)...(469): n = A,T,C or G
actgagcctcctggtgcaagctatatttaatggtgatccagatgaagtccgagcactaatatttaagaaagaagatgttanctttcaggacaatgagaagagaacccctttgcatgctgctgcctatcttggtgacgcagaaatcattgagctgcttattttatctaggagctagagttaatgccaaagacagcaaatgggttgacacctttacacagagcagtttncatcgtgtagtgaggaagcagttcagatacttttgaagcattctgcagatgttaatgctcgagataaaaattggcagacccctttacacatagctgctgctaataaagctgtaaagcgccgctgaatctttggtacctctttctgagcaatgtggaacgtgtcccgaccgagcanggaagaactgnattacatcatgnagcttttcagtgggcatgggcganatgggcaaactactcttgtc

SEQ ID NO: 934 - DNA, 385 bp, Homo sapiens
  misc_feature (1)...(385): n = A,T,C or G
gtcttctagtaagaacaaagnctgangacntgatctctcagctgcacnctaacctcctgggctccatgctgacctgtaaagctgccatgaagacantgattcagcagggagggtctattgttaatgggggaagtattatnggtnagaaaggcacccgnnggccaactctgcatacagtgccaccaaaggaggactcgttggnttntcacgctcggttgctaaagaggttgcncggaagaaaatgccngtgantgtgntgncaccaggatttattcgcacggatatgacnntgacactggaaggaagancactncnnganaaacattcctcttgggaggttnngagaaactcntgagggancacatgccgttgcgtttttttttag

SEQ ID NO: 935 - DNA, 303 bp, Homo sapiens
  misc_feature (1)...(303): n = A,T,C or G
gactgaggtggggtctttcncccaagaggaggaagaagagaacctacggcatgacaagcccccctacacctacttggccatgatcgccttggtaattcaggccgcacccttccgcaggctgaaactggctcagattatccgtcaggtccaggcagtgttccccttcttcagggacgactatgagggctggaaggactccatccgccacaacctttcctntaatnggtgcttncataaggggcccaaggaccctgcaaagccccaggccaagggcaactttttggncgggggatgggagcctga

SEQ ID NO: 936 - DNA, 532 bp, Homo sapiens
  misc_feature (1)...(532): n = A,T,C or G
gactgagatggtggctcgctgatttctccgatccctaatccgggtcacagaatggttaaagcagctttaagtanagagtggattattttcccctcagtttgtcttctgtttgcggctctgaaagaatgttgtgggcgctctttttcctggtgactactattcacgctgaactctgccatccagatgcagaaaatgcctttaaagtaagacttagcatcagagcagctcttggagataaagcatatgtctgggacacggatcaagaatacctcttcagagcaatggnggcattctccatgagaaaagttcccaacagagaagcaacagaaatttcccatgtcctgctttgcaacataacccagagggtgtcgttctggtttgtggtcacggacccttccaacaattatactcttcctgcagctgaagtacagncggccataagaaagaataggaaccggatcaacagngcattttttctggangaccntactctggaatttttaaaaannccttntactcttgctccccccga

SEQ ID NO: 937 - DNA, 256 bp, Homo sapiens
  misc_feature (1)...(256): n = A,T,C or G
tatttacttcttgtggacctctcacagatcangcngnnaaggngnatagngccttgnttgcccaaggggtnatggaaggaggtgtcntccattccacctgctganggcgcctacagaggagaataattcagaccncncagncnngggtgactaccagtccttggcctcagttcctgcctccagatttctgccttgagggggctaccctgacttccctggatgatgaactacaagntgtaagataaaataaaccctt

SEQ ID NO: 938 - DNA, 240 bp, Homo sapiens
  misc_feature (1)...(240): n = A,T,C or G
actgaggtctcctgctcaccagntgncttgacagtttttcttgcaacattggccattggttttcactgccttcaaaagatcanaattactccagaaattggagagttggatttaaaagaaaaaacttgaacaaatggacaatatgtctataacaaatacaccancaagtaacgatgcctgtctgagcattgtacatagtttgatgtgccatangacaaggtggggaaagtgaaacctttg

SEQ ID NO: 939 - DNA, 350 bp, Homo sapiens
  misc_feature (1)...(350): n = A,T,C or G
aatgggatacgacacgggncttacacagcctctcggaaacatatctatattgatanaaatacngaagattatnttgcncagggtttcacaaggcaaacagggtacctttcacagccagnanggcttttggagtncggcaccaaactcgtggnaggaaccacttccnggggaaggggtggccaagaagcacctgggcttgcccgntctttaataccggtgaagggaggcccaaaagangaaaacagggagcnaacgggtttctggcattnatggcccctcctccttttgctggnngctgncattaantgaancannccgcnncggaanattcccttagggttggggggcat

SEQ ID NO: 940 - DNA, 523 bp, Homo sapiens
  misc_feature (1)...(523): n = A,T,C or G
catgaacgtgctggagccagtgtggttcaactcacctggaatctgagcactcaggagtctgaggcaagattgccaagagttcaaggccaccctcagctacatgggtctcaaatactcaagagttcactctgcggctgaggatgacctcaagcctctgatcttcctgctgggatcactgagagctgggattacagcattggacgcgttctcacgaccggccaggaaagacgcaacaaaccagaatcttctgcggcaaagctttattgcttacatcttcaggagccagagtgcaagaagcaagagagagagaaaacgaaaccccgtcccttttttaggagagttatatttcgcctaggacgtgtcactccctgattggctgcagcccatcggcccgagttgacgtcaccggggaaggcagagcacatggagtgganaaccaccctcggcatatgcgcagattatttgtttaccacttanaacacaagctgncagcgccattcttgtaacggcgaatgtggggcgc

SEQ ID NO: 941 - DNA, 274 bp, Homo sapiens
  misc_feature (1)...(274): n = A,T,C or G
gaactgaggctttatggaaggcagtggtcggancagggcagaatcctaccctgacagcagcacactggtcattgccgtggcangngaggagacgactctggtgtgtacaacataaatcttgaaaaatggaggctggagaagcacattccaggcatcanagattaaggttgtggattatccctggtccctccagnggcanccaaangtgacanaangtggaagantgactgggngcatcntgaanctgggaagccgtgcggggcctatgatggga

SEQ ID NO: 942 - DNA, 420 bp, Homo sapiens
  misc_feature (1)...(420): n = A,T,C or G
tatttgtataactttgcnagtgctgcaacanagaagataactgaatctgttacagaaacagctcagacaatcaagaaatccgtggaagaaggaaaaatagatgatatccttgacaagactattttaggagattttcaaaaagaacagaaaaaatttgttgaggaacagaatacaaaaaagtcagaagcagctgtgcctccgtgggttgagagtcatgatgaagagacaattcancagcagattttggctttatcagctnaaaaatnngtgagtcgggctggcgaganggctcagnaggtangagctntgactgctcttccanaggtcctgngtncanancccannntccacatggtggctcacanccacccatantaggatctgactccctcttctagagagtctgaagacagctacttg

SEQ ID NO: 943 - DNA, 492 bp, Homo sapiens
  misc_feature (1)...(492): n = A,T,C or G
cactatccgatgaagatatgaccatggtgctgaagaagacagcgacnnggangatcaggacctggataaaatgtttgnggcctggcttggagaactggacaggcttactcagagttgngatnctgacaagcccaaggaacacantaataangatctnctcttnnccnggaannaantatnngcaacttttnttnccgcttntccatatacaacttgnatgaanctntgaatnatngngagactgtgnacctggatnccctgatggctgacctctgntctatagagcaggagctcagcagcattgnctcaggaaatagtaagcntnacgtcacagaaccntaaagttcctcagaagctacctgctgnccgacatacgtcacaacatggcaccctgagaggaccgtcatcttcctctaatagaacaactaaaccttcccatgctaactactccctggatgacatcactgctcagttagaacaggcttcctcctg

SEQ ID NO: 944 - DNA, 165 bp, Homo sapiens
  misc_feature (1)...(165): n = A,T,C or G
agaagtctgtggaatgttgagcatctgaggggnaacatatggnggcaccatcccaggcattccaaatggatttggtcgggctgttntatcaatacnngaaganaataatatggacaactggtnaagagaatgcaatanncncagtncagccccagtagcccaggg

SEQ ID NO: 945 - DNA, 357 bp, Homo sapiens
  misc_feature (1)...(357): n = A,T,C or G
aggctccctgctgccccatcctggccacaactttgtgcggcaccatcttagaaaccgtcccgacctatatggccccttctggatctgtgctaccctggcctttgtcctggcagttactggcaatctcactttggtgcttgcacagagacgggacccctccattcactacagcccccagttccacaaggtgaccatagcaggcatcaccatctactgctatgcgtggctagtgccgctggcgctgtggggcttcctgcggtggcgtcagggcacgagggagcgcatggggctgncaccttcctgganacagtctggngtctacgggctactcactctttggnttcatccctactgggg

SEQ ID NO: 946 - DNA, 437 bp, Homo sapiens
  misc_feature (1)...(437): n = A,T,C or G
gactgagatgagcagtttgcagatcaaggtaagacaaagtcaaagcagacaccaatggtgttatcaaaaccagcaccacttgcagnaaaagacaggaggaagaggaganagagggacagagcttgctcantctttacttcaacnnagctgatcanaagcaatcttggnngnataacacccanccaagtcgggaaggtccttgcaaagggancccaagccttccccngctctacttcangtngaagnncctttngaangagcnttcgccttgaaaacctnnagcttctccnanggangtntacngccnaggggcttcaatcggaccgtcccaggatcnanggaagaangctnttgcccatagangnttgctggacccccncagnaaactngattnggcaagtcncagntttggtncttgggaagaacagctggccttt

SEQ ID NO: 947 - DNA, 345 bp, Homo sapiens
  misc_feature (1)...(345): n = A,T,C or G
agactgaggtcaagtggactccagctaantactgtcaatcaacagcctgtttcccttccacctgcctattcctgagggtgaggtcttttccctggtcccaggacttccccacccctcctccaaataccaagactatgggcttaaaagtttcaaatgggtgctggagagatggctcagcagttaagagcaccgactgctctttcgaaggtcctgagttcaaatcccagcaaccatatggtggctcacaaccatctgtaatggaatctgatgccctcttctggggtgtctgaagacagctacagtgtactcacatatattaaataaataattctttaaaaaaaaaaa

SEQ ID NO: 948 - DNA, 397 bp, Homo sapiens
  misc_feature (1)...(397): n = A,T,C or G
ccactgagctgttgaataagtgctncagctncgncttgggagtttgncttgccagacngctctgctnttgcacctgaacagcccangggccanngtggaccctgnnacantcatngagaggggcaggtttatgctaancctatgtntacaacagtnttttggggggtgtagntccaccacntgccacattcacttgnnatganggcnctgtagncaagctagcacccagagccccttncaaggctacacaattacaggttcctcggccactctggaactgaaggggcaagcctgctccnangnnaccctanccnggngtgctggccgacagnctaggcccacatctctgntttgctggcttccnttgtactctcaacccctgccttgttctgggatc

SEQ ID NO: 949 - DNA, 122 bp, Homo sapiens
  misc_feature (1)...(122): n = A,T,C or G
catgatcccacctccccccagtctcccgggccctcctcggnctggcatgatgcctgccccccacatgggaggccctcccatgatgccaatgatgggcccccctccgcccggaatgatgcccg

SEQ ID NO: 950 - DNA, 254 bp, Homo sapiens
  misc_feature (1)...(254): n = A,T,C or G
actgagggttccaagnctgccctttggtattcaaacgggagccgctttggactgactggctgccttcctcctcctccccctcctcccccttctgcttcagatttatttattatatgtaagtacactgtagcagttgtaggacacactagacgagggcaccagatctcattgtgggtggttgngaaccacccaccatgtggttgctgggantngancnnaggatcttcaaaaaagcagncggggggtctaacccg

SEQ ID NO: 951 - DNA, 274 bp, Homo sapiens
  misc_feature (1)...(274): n = A,T,C or G
gactgaggtactacataaatagccaagnntattccatttttagtaccaggagttctattaaattagagtatgaaggaaactcatttgtatcatggaaaataccagaaagctgtaaagttgaaaacactacatcacccannacaacactacnctgcntnagggctgganttcacacantnaanccaatngctggannccaanaagtggaacggcctctgactgtggntaattcttatatntgctacttgcgggatttcacagacgggtaagtgga

SEQ ID NO: 952 - DNA, 467 bp, Homo sapiens
  misc_feature (1)...(467): n = A,T,C or G
gacctgaggccaggccatctgccttcacccgctctatgtcatgcttccctgcaccctggctgcctccctagctttcatgctacccgtggccactccacccaacgccattgtcttctcttttggaggcctcaaagtgtctgatatggcccgtgcaggattcctgctcaatatcatcggagtgctgactatcacattatccataaacagctggagtatccctatcttcaagctggacacatttcccacctgggcctactccaacacaagccagtgccttctcaatccgcctaattccactgtaccaggccactagactatggtacaacctagctctgctaggggaaaagccgctggtgccactcctcggagccaggagagggcgctccaaactccaagtcccgggacagaggtgcagaatcggntgggcgcatgcgaaatcatgtattcgngtgtttgcctacatcctg

SEQ ID NO: 953 - DNA, 477 bp, Homo sapiens
  misc_feature (1)...(477): n = A,T,C or G
ggggaaacgccgacctgantacnntccctaagcccaacagacactcacactggttcgtcatgaagtcggagaaattccatgatgagctctccgaccacgtattctttacgtntctgatccagaactgaatggtaattctccagaacagccttntggtactcctcactgaacatgcgaggcggggtcctgggattcaacgcaaaaggagtatcagagccgggcctgacgtgagatccactcgaccaccactaaaagatctgtcctgatgcggggctgtactaactgcaggactcaactgatgctggctcagagaccctgctgtntgatgtcagctagcattagagagactttaaaggacacgcctggcagggggggctggcgtatgccnttagtcacagccctggannaggcnggaggagctcttgagtttgaggccagcctggnctacagaacgagttntgggacagcctgggctgg

SEQ ID NO: 954 - DNA, 477 bp, Homo sapiens
  misc_feature (1)...(477): n = A,T,C or G
gactgaggtgtgcatgcctgcgtttccatgaatgacgcataccaggaggacagaagactgatacaccaggctggagttacagacagttgtnctcnngttgactnaggaggnngcannctncttngnctgctgngccatcattgctggatgcctttanntactgaganangnttctactgtgnntccnnggngtttnntanntcnacctcaantaacatgnggttggnngctaacnntttatgtntttnagaagtgactttnancttctggncctcctatctnctcctcttcctcctcttcctcttcttcatcctcatcctccccttcctctncctnctcctntncctcctcctnctgagagctgggaccacaggtatgtaccacacgcccagcttatacagcacactctgcagactgagctcaagtgcggtttcatgggtgtggatggcaaaaggtgtttaagctaaaaggaattca

SEQ ID NO: 955 - DNA, 305 bp, Homo sapiens
  misc_feature (1)...(305): n = A,T,C or G
actgagaacacccatcatggtagttggaagaaggatcgtcggctcacccctcctcnccttcgttcaggcacacctgccagaggcaagacctcngtggntnggatgaagtcntcttctnctatgtgcttgggggtcctggaaggacctggcccccttcaagggaccatnagagaagaannnttgttntgggaggcctttactagaaatgaagggangcttatgngcctggcttttnncnacatcccnagaggtatgnggngggaaantntgntgcnanaatcttnttgggggcagttgaaccgatg

SEQ ID NO: 956 - DNA, 358 bp, Homo sapiens
  misc_feature (1)...(358): n = A,T,C or G
ctgccatcatgctgtnacattcaccatagatagaanacttncntntntaggggaganacngacaagacatcntatcgacagcaactataaaagtgcatatccncannnnngatgancctcctttnatcgaccagctgggctttggngnggccccaggcttccagacgtttgtgtcttgccaggagcagaggctcatctacctgccctccccctggggcacctgcaatgctgttaccatggactcggatttcttcgactcctacagcatcacggcctgccggattgattgngaaacgcgttacctggtggaaaactgnaactgccgtntggtgcacatgccaggggatgccccatactg

SEQ ID NO: 957 - DNA, 517 bp, Homo sapiens
  misc_feature (1)...(517): n = A,T,C or G
tgttacctttagtgaacaagagcatgttcccaaactcaattttgggtcgtccacccttcactncaacccaccaacagcataataacttctttgctctctcaccaactctttattcacaccagcaacttatagatgcacaattcaactttcaaaatgtagacttgtctagagctgtgtccttacagcctctgacatatggaactgtcagtccaatacagaccnggancatctccatttatttcgaggaaggaagagaataagcgatgaaaaaagcttttcctcttgatggnaaacggcagcgtttccatttcaccccaccaagagccaactataatncaaccaggctagngcctttatcaagggtgacagaaggatatttccatgcccaccggntgtttcacacgcactatataccagaatatagtncagatggtggtcccaccctnntngnagaaattnccacctgnanagaaaccctccgagaaaatnacaactngccctggagggccaaagataa

SEQ ID NO: 958 - DNA, 307 bp, Homo sapiens
  misc_feature (1)...(307): n = A,T,C or G
cacatttttggtcacngacagcgatatctnaataggaggaactgggcaggagcagggcattctctccagcaggngagtggtcacgactactacaactccaacccgaaggccatcactacgggcttaaatggccgattcggctaccgccggaacactccagccctccgccagcncacatcggtgtttggagaagncacaccatttcccattttctgaagacattgcgtcacaaggcttgacctgcgtcttcaagacagatgtttagatgaactgtcaacgatattctatatttttaaagattgattcg

SEQ ID NO: 959 - DNA, 275 bp, Homo sapiens
  misc_feature (1)...(275): n = A,T,C or G
gctgttgaagctgcggntcagggtgnggccatcaccgggaccagactttcacaactggaactggcccaatgcaatgatttttgntgncacagtcatcaccaccatcggttatggcaatgtggctcccaagaccccagctgggcgcctcttctgtgtcttctacggcctcttcnggggtgccgctngngcctgacatggatcagtgccctgggcaagttncttcggggggacggngcaaagaggttagggccantttcttaaccaaggaagaggag

SEQ ID NO: 960 - DNA, 334 bp, Homo sapiens
  misc_feature (1)...(334): n = A,T,C or G
aaatggcttccaaaagagctctggtcatcctggccaaaggagcanaggagaatggagacagttgattcctgtggatgtcatgcggctagccggtattanagtcactgangcangcttcggnttgnnaagngaccccggggcacnngtaaacccgtgatgtaantggattagtaccaaaatacccagccctngaaaagatgcaaaaaacgcnttggaccattnccaaangnaggggggtnccttccngggnaggaaatcntggntgccnaaaaatttnatctcattcgccttannggggaatgnaaaaccctcaagnggcccgggaaaagaagga

SEQ ID NO: 961 - DNA, 493 bp, Homo sapiens
  misc_feature (1)...(493): n = A,T,C or G
gaactgaggatccttttgtggcattccacatcaacaagggtcttgtgagaaagtatatgaactctcttctgattggagagctggctccggagcaacccagctttgaacccaccaagaataaagcgctaactgatgaattccgggagctgcgggccacagtagagcgaatgggcctcatgaaggccaaccacctcttcttcctggtctacctgcttcacatcctgctgctggatgtggctgcctggctcaccctttggatctttggaacttccttggtgcccttcatcctctgtgcagtactgctcagtacagttcaggctcaggcaggttggctacagcatgactttgggcacctgtcagtctttggcacctcgacatggnatcacctgctacntcattttgngattggncacctgangggggcccccnccagctggnggaccacatgcatttcagcacnatgccnagcntagctgcttccgcaaggaccccg

SEQ ID NO: 962 - DNA, 115 bp, Homo sapiens
  misc_feature (1)...(115): n = A,T,C or G
ggattgaaaatgaattngattcctaaatgagaagctcgagggtgaggcaccgtttcgaactctgcngtgtgcaangaagacgaggaagttccagcatggcctcggggggatgttg

SEQ ID NO: 963 - DNA, 205 bp, Homo sapiens
  misc_feature (1)...(205): n = A,T,C or G
ctgaggtgtacagagccaatgggccagatggagctgtgggccgaggccagagaatccacctgcagttatgggacacggcgggggcaggagaaggtttcgtagcttaacccactgcattcttcagggacgcttttgggtttcctgctttcttgttcgacctggacaaatgaancaaagtttcctcaattgtccgaaactggataag

SEQ ID NO: 964 - DNA, 166 bp, Homo sapiens
  misc_feature (1)...(166): n = A,T,C or G
tgaggatgagttccacccgttntnngaggcgctgctgccgcatgtgcgcgccttcgcctacacctggttnaacntgcaggcagcgcaagcgcaagtacttcaagaancncgagaagcgcatgtccaaggacgaggngccgctnttttttatgatcaatatgagaga

SEQ ID NO: 965 - DNA, 325 bp, Homo sapiens
atagaaggtggtgatggactacagctcagaaaggaacatactctcaaaatatttgcttatatcaattcctggactcagaggcaatgtctatgctgcttcaaggaatataagcatttggagatttttaaccaagtagtatgtgcacttattaatttagtcattgcccaagttcaagtgctccgggaccagctttgtaaacattgtactaccattaacatagattccacgttggcaagatgagagtaatcaagcggaagaaccactgagtatagatagagaatgtaatgaaggaaatacagaaagacaaaaatcaatagaaaaaaaa

SEQ ID NO: 966 - DNA, 500 bp, Homo sapiens
gactgaggtatttacataaggaatttgcagagtcctggtcagttccaaggttggcagaaggctttgatgtcagcactgatgttatccgaagggttttaaaaagtaagtttgtacccactttagagcagaaactgaggcaggaccaaaaggtcttgaaaaaagctgggtttacccgagagattggtcagctccccgtttctgaagataccttgaaggcgctcagtgcaggccgctctgtgtctggcctgctgatggcaggggatgaagtctcctctaaaagtcagaatcacagcacagctttgaaagtggcgaagtcgcaccctcacagcacagacgcacagaagaaacgggaagggagggataaaagaatccaagtcttggaagagagcctagtgcctgccaccacagccttgggtcatcagcgagagcttcagaaatcccgccaccagtgacttccgaggccaccggaagagctggcagtgatacgttaccaagtgctg

SEQ ID NO: 967 - DNA, 149 bp, Homo sapiens
gactgagaggaagacgaacagctctccccactggagccataactttacccatgagccttcactctcagccagggcagacaagagcccagcgcgtctgagactgttcctgctctgacccagatatccaacctgctagtgtgtgaggtcat

SEQ ID NO: 968 - DNA, 339 bp, Homo sapiens
  misc_feature (1)...(339): n = A,T,C or G
gtcccatactacaaggaacccactgatctggtngaanaagatggccaagattactacnttngcgaccaggngagatgatgcagcagtgatatngtagcanggnacttcattgagcangctganttntcngggnacctgtncgggacatgnanggaagntgtcttggctgagcangccatnaacctcatctgcgtgctannngtatgacctacnnggggggcgcngcatcnanaagactgntcttgtgtncgattctacatctttgggcagcctncctcgctggacgtgctggagcaacgactgcnacngcgcaacactgagactgatgagagtctggca

SEQ ID NO: 969 - DNA, 452 bp, Homo sapiens
  misc_feature (1)...(452): n = A,T,C or G
gaccccattgtgatagctcatcgcttgtctaccgtncgtantgctgacgtcattgctggggntgatgntgnngtnattnngnagcaaggaantcatgatnagctcatgagananaagggcanttacttcaaacttgnnatgncncanacagcagtgaaatganattganttatgganattgaancttgtaaatctaaggatganattgataatttagacatgtcttcaaaagattcaggatccagtctaataagaagaagatcaactcgcaaaagcatctgtggaccacatgaccaagacaggaagcttagtaccaaagaggccctggatgaagatgtacctccagcttccttttggcggatcctgaagttgaattcaactgaatggccttattttgtggttggnatattctgtgccataataaatggaggcttacagccagaaaaaaaaaa

SEQ ID NO: 970 - DNA, 471 bp, Homo sapiens
  misc_feature (1)...(471): n = A,T,C or G
actgagaatggtccagaactacccatgagtcagtttggctggagctcgtgagcattcaataatgagtggtgcggctttaggacttganattgtttttgncttttttctggcattgntcctcctgcatcgctatggagactttaagaaacagcacagactggtaatcatcggcacactgcttgcttggtgtctctgctttctcattgtcttcatactgccgctggatgtcagtacgacaatatataaccgatgcaggcatgctgctgcaaattccagccctcctgaaaataccaacgttacgggactggatgcatctgtcactccagctccaagacagcatccatgtttcaagccgnggagttacattccagatggaatcatgccaattttctggagggtagtttattggacatcacagtttttgacgtggatcctgtnaccttttatgcagncatatgcaagatctggagg

SEQ ID NO: 971 - DNA, 408 bp, Homo sapiens
cactgaggatggcctcaggcaaagtacgctgcacccgaaagctgcggagctggatcgtggagcaggtggagagtggccatttcccaggggtgtgctgggacgatgcagccaagaccatgttccggattccctggaagcatgcaggcaagcaagacttccgagaggaccaggatgctgccatattcaaggtgagagttcctgaaggcaccccaaagcacttttgtctgtttggggtttggataaaggaaatactagaaagtagaacctgggctggtgagatggctcagcggttaaaagcaactggctgcttactcttccagaggtcccgagttcaattcccaacaaccacatggtggctcacaaccatctgtaatgggatctgatgccctcttctggtgtgtctgaaaa

SEQ ID NO: 972 - DNA, 279 bp, Homo sapiens
ctattggaagaggcaaccatttcagtttgcaagtctttggttgaaaacaaccctcgaacaggaaatcttgctgcgctaactaaggtcttcctatctagaaccagggagctcaggctctcagccgagtgtcagaaccacatcttcatctggcagacacacaatgctctgtttattatttgctgcttgctgaaagtgttcatccgtgagctgtctgaggaagagctgcagcttcattttacatatgaagaaaagtcccccggcagctacagttctgactct

SEQ ID NO: 973 - DNA, 535 bp, Homo sapiens
gactgagtataggtactgcttgctttctgcactaccaccctcaagaaactcagctatacaagttgggggaatgaatgagaaacgtcatttcactcattatgtacagactacacgggactgcagcagtcagagcccaaaggacccactgatgaagaggaaaatatcgctaagagcaaaggacaggcaactcgaggtggaacagtgtaaagacctagggtgttccatttggccacacctaaggaaacacctccttcttgtctgaagaatggttgagtgctgatctaaggatcagcatcgaggcacttacttgaattaaaaaacctactataaaatgcattccgaatagtaaccaggccgggtagaggctggcgacggctaaacccttctccgtggtgtctgtttttgtacacaacgctacgaagggggaaagccaggcttgtgggtattcttacactcacggctaagacccagaagccggggcagcatcaggaccagatcccaatttcccaaatgactggcactgaagagggggaag

SEQ ID NO: 974 - DNA, 458 bp, Homo sapiens
  misc_feature (1)...(458): n = A,T,C or G
gactgagacagctctggccctcctgctgctcccatagcccgaattanaaccaccaggaagaaagaatcttatactgattctgtggaggacctgagatcccggggatgtggccactggacagtgcttcggtctcttcacctgaggggagcctccccctaaagaagaaactgagtagagccgtgacagggagacgccattcacagacgaatctgaagtcactgcaccttgaagggtagatgggtgcacaaggaatgggcggcatgctgtcccgtttctcccagcactggacagaaccaagctgtgctggtgcaaccctttaatcccagcacctgggaggcggagacaggtgcatctctgagtttgaggccaggctggtctctagttccaggagagccaagaatccttaaatttaaaatatatgatatataggtcaatcacanagtgcttgcctagcatcg

SEQ ID NO: 975 - DNA, 531 bp, Homo sapiens
  misc_feature (1)...(531): n = A,T,C or G
actgagctgccaatggtgtccttaccatactggaacttaccaagaccggctaacaaagctgcaggaccaccttcggcaactttctattctcttcaggaagctgcgactggtctatgacaaatgtaatgagaactgtggtgggatggaccccattcctgttgagcaactgattccatatgtggatgaagatggctcaaagaacgacgaccgggctggtccacctcgttttgctagcgaagagagacgagaaattgtagaagtaaataagaaactcaaacagaagaatcaacagctgaagcagattatggatcaattacggaatctcatctgggacataaatgccatgctggcaatgaggaactaaagcgatatttaaatctcctgctctactcatgtgatgaagttgggttttttcccccctcttgagtattcctccctttgaaaaacgttatttatgtctttattttaacagctagcactaaagnttctgttttcactttaaaagtatttactagcttttttttaatactg

SEQ ID NO: 976 - DNA, 441 bp, Homo sapiens
tgagggggcagctggcatcctctgctacgtgggagcctatgtcttcatcacctatgacgactatgaccacttcttcgaggatgtgtacacagctcttccctgccgtggtgatcatagctgtaggagccttgcttttcatcattggcctgatcggctgctgtgctacaatccgggagagccgctgtggacttgccacgtttgtcttcatcctgctcttggttttcgtcacagaagtggttgttgtggttttgggatacgtgtacagagcaaaggtggagaacgaggttgatcgcagcattcagaaagtgtataagacctacaacgggaccaactccgacgctgccagccgtgctattgactatgtgcagagacagttgcactgttgtggaattcataactattcagactgggaaaatacagattggttcaaagaaacaaaaa

SEQ ID NO: 977 - DNA, 400 bp, Homo sapiens
  misc_feature (1)...(400): n = A,T,C or G
gaactgagtaacaggatctcggtgactggctcattgtggaaagtacagtctctggagtagaagaggaggactgagaactacaggctcagatctctattnagacatccaacagaattaatactatcattggctataacatgaagctattgngttaaagganagaagtcgagtgntaaaagacttcctactccaggatatcctactgaagaagtccagaanaagcatggtggccctgactgacagcagacatgctgnctgatgctaggctgcnggggctgcgtgtgctntcccaccctttgtgnctngaagnngacngtgctcaaanngatgngganaggancggagtccgganatcactgggactcggacatcgnctacacngagggttgaacccacaggt

SEQ ID NO: 978 - DNA, 393 bp, Homo sapiens
  misc_feature (1)...(393): n = A,T,C or G
catgcgctgtggatatggagacagcccttcaaaaggagcagttccatatgtgcaagcatttgactcgctgcttgccaatcccgtggcagagtacttgaagatgagtaaggagatcgggggagatgtgcagaaacacgtaaggacacggnggccctttctttctcctcctatttaaggactggangcttttcttcacatctcttcaccctcatcataggggcgtccggnagccccctgactccttttcttcttcctttattggtccaggaacagaaatggggttcatttttctaggtctcctgttttattacatattctgtgtgtttcttttatgacaaagcttgnntggtcataaaatacaactgngntcatctttgtgggggaaaaaaaaaa

SEQ ID NO: 979 - DNA, 465 bp, Homo sapiens
  misc_feature (1)...(465): n = A,T,C or G
actgagaccagatcactcctggntgaagtgacagctgtggtgaagattgaaaaagatgttggtggcaataatgggggtagcggcaatggtggcggtgccgccttttctcagactcgaagcagcagcacaggcagtagcagcagcagtggtggcggaggagggcagcagaaccagacatcaggaggctcgctgcaaggaagtcagcagaaagagggagagcaaagtcagcagacacagcaacaacaaattcttattcagcctcagctagttcaaggaggacaagctcttcaggcccttcaagcagcaccattgtccggacagaccttcacaactcaagctatttcccaggaaacccttcagaacctccagcttcaggctgttcaaaactctggtcccatcatcatttcggacaccaaccgtggggcccaatggacaggtcagttggcagacccttcagctgcaaat

SEQ ID NO: 980 - DNA, 234 bp, Homo sapiens
gactgagcctacacagtccagacatccgagggtgtacgcccaacagccgcttctgaggcccgtttgaaagccttggctgtttgccacgggcctctggaccactacgactttctgatcaaatctcaggagctgagggaggatgaacatcaaagaagagtcgttcagtgtttgcagaagttacaggaggaccttaaaggatacagcatagaggaaggagggctcttttcaaagctt

SEQ ID NO: 981 - DNA, 194 bp, Homo sapiens
  misc_feature (1)...(194): n = A,T,C or G
gaggccataataacttcntgtggnactctcagaggccngnacacngaagcatggcttggtnccataacacangaacnngcatcgaaggcgngngcngangggcccacaggccnacagnaggagagggccccaaagctaccaagggagnctctggccacanatgngactcgttgntcctcctgggactgcgatgg

SEQ ID NO: 982 - DNA, 128 bp, Homo sapiens
  misc_feature (1)...(128): n = A,T,C or G
gactgagcctgtgcctactgcactagcccaagtggacagagagaagatctatcagtggatcaatgaactgtccagtcctgagnnagntntccatgatgtctcaaagnataagctttaagaaaagaaca

SEQ ID NO: 983 - DNA, 484 bp, Homo sapiens
  misc_feature (1)...(484): n = A,T,C or G
tctggggagctcctgcattaagtcagactgaggctacgagggccccggttctgtactggtgtctccggtgccgcaccagatgctgccctacatgaacgtgggcacgctgtcgcgcactgagctgcagctgctcaacccagctgacttgtcggcggaagcggcggcaccgcaccatcttcaccgatgagcagctcgaagccctgggagaacctcttccaggagacgaagtacccagacgtgggcactcggggagcagcttggcccaggaagggtgcaccttcggaaggagaagggnggaggtctggttttaagaaccgccgagccaagtgggagacgacagaaagcgatcctcntcggaggagntcagaaaaacgcccgaagaagtggaacaaagaacgtcctnaaaaagccttcgccggagaagaggggaagaaggaaggtaaaagcgatttggactnnggacagcttgacgggccgcggcccg

SEQ ID NO: 984 - DNA, 464 bp, Homo sapiens
  misc_feature (1)...(464): n = A,T,C or G
tgttcaatccaatgactccaccacaagtcaatagctatagtgagccatgctgtctccgacccctccacagccaaggagtccccagcatgggaacagaaggactttctggtctgcccttttgccaccaagccaactttatgtcagggtcccagggttatggagcagccagagagaccagcagctgcactgaaggatctctctttcctcctcctcntcctcctnggagtanagtcanattaacaaagaggcggactctntccatntcgcccctttnngatgccagcctggacctgcaaaccgnaatccggaanctnacccaactnacntgggaggntntnatnaactntcgctgtacatannngggcggttnctacggncatctntccattgnnaccatgagcccttcttaaggattcccacctnagatgagncatcaaaaaggaacttcacctcccttatggagg

SEQ ID NO: 985 - DNA, 495 bp, Homo sapiens
  misc_feature (1)...(495): n = A,T,C or G
gagccgttcagtccaatgcattgatagttaatttgacagattcaaagggtacttgcctttatgcagaatgggagatgaatttcacaataacatatgaaactaccaaaccaaaccaataaaactataaccattgcagtaccctgacaaggcgacacaccgatggaagcagtttgtggggatgaccggaatagtgccaaaataatgatacaatttggattcgctgtcctcttgggcctgngaattttaccaaggaagcatctcatttattcaattcatgacatcgggctttcctacaacacttagngatagcacaagtattttcctgggngctgnagctaaagggagttcatactggttaaaaancctggagaattttcaaagntncctttgnaaggccatcctttaaggggcaatagnggttttaaacttaacaaaccctgacttccctggccgttcaaaaaatattggggggnatttcnccctgcaggctttttg

SEQ ID NO: 986 - DNA, 274 bp, Homo sapiens
  misc_feature (1)...(274): n = A,T,C or G
tctggggaacctcctgcattaagtcagactgagggcngnacccacagtccagtaagctagatggcagngttactatngatctacnggcnngatggctatcccagcangttgntcctggnctacaaagtcttgnatgacnngangaaggccatccctggntttcctcttgngncgcacaanacccgnctgcacattgcanaggacccctctcttggactatgagtacttgcccntgntgnncctgaaatcattcatccngtcttctttggaactc

SEQ ID NO: 987 - DNA, 501 bp, Homo sapiens
  misc_feature (1)...(501): n = A,T,C or G
tgcttactgagcgtcanancttncacatggaacangttgaaatatgctgaactacgtgcccggcagcaaatggagcagcagcagcagcatggccagacacctcagcaggcgcaccagcacacgggagggccggggatggccccacttggagccacaggccaccctggcatgatgccgcatcagcagccccctccctacccactgatgcaccatcagatgccgccaccccatcctccccaaccaggtcaaataccaggccctggctccatgatgcctggccagcccatgccaggtcgcatgatccccgctgtggcagccaacattcaccctactgggagtggccctacccctcctggtatgcctccaatgcccggaaacatcttaggaccccgggtacccctcacagcaccaaacggcatgtgtaagtagcacagtgggacgacattacccagcatcctgctttggaagctacagataaggaagaaatgctttcttcgtgaa

SEQ ID NO: 988 - DNA, 323 bp, Homo sapiens
  misc_feature (1)...(323): n = A,T,C or G
gactgagaatcctacnattcctcatcatgacnccttctcaggncacttttgaaataagaggaactcttttaccangagaggnctttgcaatatgnggaagctgcgatgccctgnnaaactgnaatcctcaaaatgctgcggctcttattantgaanacgacacaggagacagcgngttgtggaaagcagcgattgctctcaatanaggagngncagngaagnaccgcnacttcagaggcngctttttagaaccannggaaggatgtctttatatattnttttattactgnaggacttngcatagtancaactttaagtttgaa

SEQ ID NO: 989 - DNA, 138 bp, Homo sapiens
gactgagaaagagtagttgagcagctgcgcagaacctgatagtcaaacaagagcagccggacaagttccagatacagccattgtcacagtctgaaaacaaactacaaacagcacagcagcagccactacagccactgc

SEQ ID NO: 990 - DNA, 383 bp, Homo sapiens
  misc_feature (1)...(383): n = A,T,C or G
gactgaggtttgatctgtggatgaaatgaatcatgattttcaagctcttgcattanaatctcggggaatgggagagcttttgcctaccaaaaagttttgggaacctgatgattcaacaaaananggacaangaggcgtatntcttggcnangatgaangganagagactgcatggggaacttctcatcattcaatgtcccagcctattatggtgcagagaagatctggacagagttttcatggaaacagtgaagtaaatgcaattctttctccacgctcagaaagtgggaggccttggtgtgagcatnggtagaatatgtattaagttcctctcctgctgataaatgggattctcgatttaggaagggaacttttggaactat

SEQ ID NO: 991 - DNA, 363 bp, Homo sapiens
  misc_feature (1)...(363): n = A,T,C or G
gactgagagtctatgatggaagtcaaagggaagaaaaagtttacaggaaagagtccacagacatcacaaggaaagaataaatttcataagaacagtgagtctagttcttcaaagacattcccaaggaaagctgttaaggaaggcggacctaaagtcacatctaagaactttgagaaaggtgccacaaaacctggcaagaaaggtgtgaagcagttcaagaacaagccacaagggggcaaaggaccgaaggacaaatttcagaaggcaaatanattcagcaagaagcggaaattccagccagatggtgaaagtgatgaatcaggagccaagaaacccaagtgggatgactttcaaaaaaaaaaa

SEQ ID NO: 992 - DNA, 540 bp, Homo sapiens
tctcccgactctcgagagactacattcgtcgtcctcctcttgctgcttcttgccgtgcctggagttactgtccgtctcttaagaagtctgccaggccggttacatttctctttccacgagctccttacccataagtatcttccctgagctgtcagtcgctgacccggttgactttcgacgccccctccccaactcctcgcaagcctgatctctgacctttgaaccctagacaccctcatcaacactcttccctcagtgtatccccacatccaacagtcgggatgccgggtgctcccacatcctctctgttccaaataaggcccaccccaggtaggttgtggctgaggagtacgagcctgaggacagcaagagtttgtagtatatagtccactgagatccctgacgcctcgctccacatcaggaaggtcccaccctgaaattccggctccacatacaggatcttgagtctccgaacacctggatccttcgagatgtgaggtcctgtgtccaggtgagcagtgtgctcttcaaaaaaaaaaa

SEQ ID NO: 993 - DNA, 639 bp, Homo sapiens
  misc_feature (1)...(639): n = A,T,C or G
ggcggtttgaagcctctgtgatcgaggagcggcgcaagggcgcggaggacctgctgcgcttcacggtgcccatccctgcactcaacaacagcccccaactcaaggagtttttccggggcggggaggtgacacggccctctgaggtgtccagggacctgcgaatcctgccaccccctctcatccccacaccacctccggatgaggcccggctacttcagccgctgcctgcggaaaggaggggccaggaggagttggaggtgccagtggatcccctcccgtccagccctgcccaggaggccttggaccttctcttcagctgtgacagtacggaggaagcttccagctccctggctcgaggtcccctctctgaggctgaacttgcccttttcgacccttactccaaagaggaaagtacaggccccagccctacccacacaggtgagctggcagccattgaggtagagtccaaaaggctggaccaggaaccctgggagccaggaggacaggaggaggaaaaagctgaggatggagagcctgccccagcttaccttggccaggccacagagctcatcactcaagccctgcggaatgaaaaggctggcgcctacgctgctgntntncaaggctaccaagaagggg

SEQ ID NO: 994 - DNA, 770 bp, Homo sapiens
  misc_feature (1)...(770): n = A,T,C or G
gtggggtctttcagtgctggaccctgactgccaagaagaactacagggcagatggcatcgggagcagcccactctctaatcaggatgctttccgtctatggtgcctcttcaacttcctgtctgaggacaagtacccgctgatcatggttcccgatgaggtagagtatctgctgaagaagctccttggcagcctgagtttggagatgggcctgggcgagctggaggagctgctggcccaggacgcccagtcagcccagaccgccgtggggctcagcgtctggcagtttctggaactcttcaactcaggccgctgccttcggggtgtggggcgcgactccctcagcatggccatccaagaagtctaccaggagctcatccaagacgtcctgaagcagggctatctgtggaagcgagggcacctgcggaggaactgggccgagcgctggttccagctgcaacccagcagcctctgctactttgggagtgaggaatgcaaggagaaacgaggcaccatttcccctggatgctcactgctgtgtggaggtgcttccggaccgcgaaaggaaagcgctgcatgttttgtgtgaagactgccagccgcacctatgagatgagcgcctcagacacccgccagcgccaggaagtggacgggccggtcacnngcncgccntnngtttanctgggcctgttcaccgaaantgaccttttggggccccttttncggtaggngactaanaacaaggcttgactcccgtccggctctgccctta

SEQ ID NO: 995 - DNA, 521 bp, Homo sapiens
  misc_feature (1)...(521): n = A,T,C or G
gacgtctggggagctcctgcattaagtcagactgaggtcccttcactgatgttgtcaccaccaacctaaagcttggcaacccaacagaccgaaatgtgtgttttaaagtgaagaccacagcacctctgcangtactgcgtgcggcccaacagtggggtcattgatgccggggcctctctcaatgtgtctgtgatgttacagcctttcgattatgatnccaatganaaaagtaaacacaagtttatgngttcagnctatgtttgctccacctgactcttntnanatggaggcagtatnncaggnggcaancccggaagaccttatggattcaaaacttagatgtgnttncnantcngccaccatnaaangctagtccacatgntgnagaaatanataaaatcatacctacggagtgcntncaanacanaagcaccggcagccgcaaagtccctgacatcgcccctcgatgacacagaagtaaagaaggngatggaagagtgcaggcggctgcaggggggagg

SEQ ID NO: 996 - DNA, 800 bp, Homo sapiens
  misc_feature (1)...(800): n = A,T,C or G
gacgtctggggagctcctgcattaagtcagactgaggtggggtctttcacgctggcttcgcgagcagtccggacccacgatcgcttttggcaaccagaaccggcgcttcagcccccggggtgacgtgcagcccgccgcccagacacatggccccgagcccaagaccccagcatgtcctgcactggagggacgcccacaacttatatatantgtacgaantgatgntnttgctcagtcgggcctggagccgcctgaggggcccagaagtcccagaggcatggctggcaaaaacagtaacaggagcagatcagatagaagctgcggctctgctgacacctacccctgtctctggtaacctcctccctcatggggagactgaagaaagtggatctcctgaacagagtcaagcagcccagaggctctgccttgtggaagctgaaagttcccctcctgaaacttggggactttcaaatgttgatgagtacaatgcaaagccaggacaagatgaccttagagagaaggaaatggaacgcacagctggcaaggccacactacagcccgctggcctgcaaggggctgataagaggcttggggaggnggtggctagagaagagggagtggctgagcccgcttatcccacatcacagntggagggtggnccagcttgagaatgaagaggatggagaaacagtgaagacttaccaagcttctgctgctttcatagctncgggatacaaacccagcacccctgtgccttttttggggaggcanaacatcaagccacggaagaaaaaggaaca

SEQ ID NO: 997 - DNA, 658 bp, Homo sapiens
  misc_feature (1)...(658): n = A,T,C or G
gacgtctggggagctcctgcattaagtcagactgaggtacccacccggcngcatggcaaccctacagctgntcatagctcccttgctgtgnntcctgcttngggtcttttgngctccaggtgccagancccatgaccatgnggctgatgnccatnatggnagcntggncctggataagancacagtgcacgaccaagagcacatcntggaacatntngaaggtgncatcgaccaaccagaggcggagatgtccccacaggaactgcagntccattacttaaaantgcatgattacgacggcaacagtttgcttgacggcctanagctctccatagccatcactcacgtgcacaaggaggaggggagtgagcaggcgccagtcatgagcgaggatgagctcgtcagcatcatagatggtgtcctgagggacgatgacaagancaattgacggctacatcgactacgctgagtttgcaaaagtcactgcagtagaccgttggctcttttccttttgtgcacatgtgacccttgctaatgngatggacgtgtctggtaatgcgaaacaacttatttccgtctactgctcaacacttttggtaaaaaccctgtggcannctgntanaatggggtggaggaaanaaaccacatgactggggaa

SEQ ID NO: 998 - DNA, 247 bp, Homo sapiens
  misc_feature (1)...(247): n = A,T,C or G
gggtgagccatagactatcctaggaaaccaaaccagggcccngcnttgttcagagaggggacagataatgnactccctganccgnngnatcnaggatagcaccccacagtgcatncctgnctattnagaggcacanactctcagcacgtgggagaccttgctacctacggacaatncttgatntacagntgtattgccacttncttgctcaacaaacctgttactttnttggaaataatatttaatt

SEQ ID NO: 999 - DNA, 378 bp, Homo sapiens
  misc_feature (1)...(378): n = A,T,C or G
ccatggtaacatgcttatnctgtntacacttctatatggacaagaagtctaaactaggaacctacctactctggacaaccattcccatctccacccanaggacaccaatcatcgtgacaccacgtccatcttttactaagttcccccaacctcttcctcctctcactagtagacttaatacagaagcaaggatctaggccgggtgttgctactctgaaacttattgcacgagatattgtcaatttatcccctaactgacctcccagagaagaaagaagtgggaagaaacggcgaatagaaggcaagagacactgatcagttagaggggaaactctacatcttctctggttgagagtctggnaactgaagaaggcaaaa

SEQ ID NO: 1000 - DNA, 248 bp, Homo sapiens
  misc_feature (1)...(248): n = A,T,C or G
ttatcatggggcgcaagttggatcctacgaagaaggagaagcgtggacccggccgaaaggcccgaaaacagaagggtgcggagaccgaattggtcagatttttgcctgcagctgncgatgagaattccatgaggctgtcnagtcttncccgaatncgggcanccaagaggagggcagggtctgttgacgtccctaagccaaataagtctcctgggatcaaaacattgcctggagagttatccaaagga

SEQ ID NO: 1001 - DNA, 683 bp, Homo sapiens
  misc_feature (1)...(683): n = A,T,C or G
ggactttgaatatgtcggggatcgccctcagccgccttgcgcaggaaaggaaagcctggaggaaggaccacccttttggctttgtagctgtcccaacaaagaaccctgatggcacaatgaacctgatgaactgggagtgcgctatccctggaaagaaggggactccatgggaaggaggcttgttcaagctacggatgcttttcaaagatgactatccgtcctcaccaccaaaatgtaaatttgagcccccactgtttcatccaaacgtgtatccttctggcacagtgtgcctgtccatcctggaggaagacaaggactggaggccagctatcaccatcaaacagatcttattaggaatacaagaacttctaaatgaaccaaatattcaagacccagctcaagcagaggcctacacaatttactgccaaaacagagtggaatatgagaaaagggtccgagcacaagcgaagaagtttgccccctcataagcagcggccctgggctccatgacgaggaagggattggcttggcaagaacttgtttacaaccttttgcanatntaagtcgctccgtacagntactantcncctggganggntgagcgggcnccattttccttttccgccattggatattcagncttttgatttttgantattaannaaaacttgcttttattttaa

SEQ ID NO: 1002 - DNA, 665 bp, Homo sapiens
  misc_feature (1)...(665): n = A,T,C or G
tctggggagctcctgcattaagtcagactgaggtcctcagtatggcagcctggagcgggcgtggggcgccatgatgacagaagcagataaggtcagcgagctgcaccaggaggtgaagaacagcctgctgaatgaggacctggagaaagtcaagaactggcagaaggatgcctatcacaagcagatcatgggtggcttcaaggagacgaaagaggccgaggatggcttccgaaaggcccagaagccctgggctaaaaagatgaaggagctagaggcggccaagaaggcctatcacttggcttgtaaggaggaaaggctggccatgacccgggagatgaacagtaagacagagcagtcggtcacccctgaacagcagaagaaacttgtggacaaagtggacaaatgcagacaggatgtgcaaaagactcaggagaagtatgagaaggtgctggaagatgtgggcaagaccacaccacagtacatggagggcatggagcaggtgtttgagcagtgccagcagtttgaggagaagcggctggtcttcctgaaggaagtcctgctggatatcaaacggcatctcaccctancggaaacagcagctacttgcatgtctaccgagaactggagcaggccttccggggggcccgatgccccaggaggacctt

SEQ ID NO: 1003 - DNA, 233 bp, Homo sapiens
  misc_feature (1)...(233): n = A,T,C or G
acttgcaaaattatgaaggantctanaagcagagganaacataaaagnccancnccttngnnccncttatccncaccctccctgagtcttggcatggacacacctatnaangaccttcctggngcagatacatnctcgnatgtgaagggagaaaagcttactcgctgnaaacttgccagnctctacaggctngcagacttgnttgggngggcgcacctggcaaatacgtacat

SEQ ID NO: 1004 - DNA, 343 bp, Homo sapiens
tctggggagctcctgcattaagtcagactgaggattacaacattccagagtcccactggggaagaacaagatacttcaataaatgaaggagaacaaagaaaactcaagcccttcagtcacgtcagcaaacctggaccacacaaaaccatgttggtactgggataagaaggacctagcgcacacaccctcacaacttgaaggactcgatccagccactgaggcccggtaccgccgagagggggctcgcttcatctttgatgtgggcacacgtttggggttgtatcctgaatctctgggatttgttgtgaataaactccatcaccaagaattagattaaaaaaaa

SEQ ID NO: 1005 - DNA, 596 bp, Homo sapiens
  misc_feature (1)...(596): n = A,T,C or G
tctggggagctcctgcattaagtcagactgagnattaaatctgagagaatctgacatcagagtgtgtgatgaatcatcttgtaaatatggaggtgtctgcaaagaagatggagatggtttgaaatgcgcatgccagtttcagtgccatacaaattacatccctgtctgtgggtcaaacggggacacctaccagaatgagtgctttctcaggagggctgcttgcaagcaccagaaagacataaccgtggtggcgcgtggaccttgctactctgataacggntctggatctggagaaggagcagaggaggaaggctcaggagcaggngctnacaggaancattccaagtgtggaccgtgcaagtacaaggccgagtgtgacgaggatgcggagaacgttgggtgagtntgtaatatagnctncngtggcttcacnannnnacnctncccgcgntganganngancntcctanaatgnccgntgtgtcntccgaaaggcgacttgcataaagcactgaacngatcgacanantagcnngtcngccnctggncatacacagatgangtggagattattgnnaaagaaggacgacgggctg

SEQ ID NO: 1006 - DNA, 578 bp, Homo sapiens
  misc_feature (1)...(578): n = A,T,C or G
cccagttgtgacatgatggaactaaggcgccgttatcagaacttatatattcctagtgacttttttgatgctcagtttacatgggtggatgctttccctttgtcaagaccatttcaactgggaaattactgcaatttttatgtgatgcaccgagaagtagagtccttagaaaaaaatatgggctgttcttgatccacctgatgctgaccacctgtacagtgcaaaggtaatgctgatggctagccctagtatggaagacttgtatcataagtcatgtgctcttgctgaagacccacaagaccttcgtgatggttttcagcatcctgctagacttgttaagtttctagtgggaatgaaaggcaaggatgaagccatggccattggaggccactggtctccttcgctggatggaccaaacccagaaaaagatccctctgtgttgattaaaactgccattcgttgttgnaaggctctgacaggcattgatctaagngtatgcacacagnggtaccggtttgcanagattcgntaccatcgccctgnggagacccacaaggggcgnacagttccagctcatg

SEQ ID NO: 1007 - DNA, 716 bp, Homo sapiens
  misc_feature (1)...(716): n = A,T,C or G
tctggggagctcctgcattaagtcagactgaggcctgaaactcagcaccgaggctctgcaccccactccgagagcgacatcccagagcaggaggaggagattctagggtctgacgatgacgagcaggaagaccccaatgactactgtaaaggaggttatcatcttgtgaaaattggagatctatttaacgggagataccatgtgattcgaaaattgggctggggacacttttccacagtgtggttatcatgggatattcagggaaagaagtttgtagcaatgaaagtagttaaaagtgctgagcattacacagaaacagcactagatgaaatccggctgctgaaatcggttcgcaactcagacccgaatgatccaaatggagaaatggttgttcaactactagatgactttaaaatatcaggcgttaatggaacacatatctgcatggtgtttgaggttttggggcatcatctactcaagtggatcatcaagtccaactatcaggggcttccgctgccttgtgtcaaaaaaattattcagcaagtgctacagggcctggattacttacacacccaagtgccggatcatccacaccggacatcaaaccagagaacatcttgttgtctgtgaatgagcagtacattcgaaggctggctgcagangccacanagtggcagcgctcangagctcccccaccatcggggtcttgcaggctg

SEQ ID NO: 1008 - DNA, 276 bp, Homo sapiens
  misc_feature (1)...(276): n = A,T,C or G
gtctggggagctcctgcattaagtcagactgagtgctccactccagctacgggaactggtgaactgtcgttgggcggaagaagtgacacagcagcttgacactctccagctgtgtagtctcaccaaacatgaagaaaatgagaaagacaaatgngaaaatcaccatgaaaaacttagtagtgttttgctggacttgtnagaagtgtatctgccatnagtgngcnctttggggaggaatggngngcngancaaatgttntntttggtttacatacta

SEQ ID NO: 1009 - DNA, 102 bp, Homo sapiens
gaacggtcatcaaagctccgctgtgcttggttactggtgttcctggcaggttcctccgtcctcttatattacacctttcattctcagtcacttcattacagg

SEQ ID NO: 1010 - DNA, 781 bp, Homo sapiens
  misc_feature (1)...(781): n = A,T,C or G
gtttatcaatgccagcaagaagaatagtgcagcccatgattgaccagtcaaatcgagcagngagccaaggagcagcntatagtccanagggtcagcccatggggagctttgtgttggatggtcagcancacatgnggatncggcctgcaggacccatgantggaangggcatnantatgggcatggatggccagnggcactatatgnanncttngccatgtnangcaatctctnggcaaggggaagtttgcanagcatgccnggggactacnttnctcagggtggtccnntgggaatngntatggcccanccaagttacactcctncccagatgaccccacaccctactcagttaagacatggaccnccaatgcattcatatttgccaagccatccccaccacccagccatggtnatgcacggaggaccccctacccaccctggaatgactatgncannacatagccccacaatgttaaatnctgtacatnccaatgttggcggacaggttatggacattcatgcccantattttaanggaactcnnggaanaaggaaacacacncaaaaactattttaagactctctgaactttgaccanatgtgacacttaatatgaaactccagacanctgtgattattttttactttnntggnatttntcatcnagcaacagaggaccantgngacangaacacanatgtgaaagcgacgggctcatcgtgacaattttgnccatgcaaagatcctttggagaaanactncgagagttataactact

SEQ ID NO: 1011 - DNA, 158 bp, Homo sapiens
  misc_feature (1)...(158): n = A,T,C or G
gcctgagccgggctgggctcccatttgggttgatgcgccgggagctagcatgngagggctaccccatcgagctgcggtgcccggggagtgatgtcatcataggtggtggcaaacgggcaggatgagtatttaataaaagttcgcaagtttccaaaaaa

SEQ ID NO: 1012 - DNA, 117 bp, Homo sapiens
  misc_feature (1)...(117): n = A,T,C or G
acttttcctcccccccttgatctcgctgcctgtgaaagccngggnntagntcaactaagacgcctcctgcgagaaagccagagaagagctanggggctgggggaaggagtctaaaat

SEQ ID NO: 1013 - DNA, 105 bp, Homo sapiens
  misc_feature (1)...(105): n = A,T,C or G
cattagtcagactgaggcgncaagcccatctgngtgngctcgcatccaactgtgatgagcccatgtntgtcaagctggtggaggcactttgtgctgaacaccaaa

SEQ ID NO: 1014 - DNA, 212 bp, Homo sapiens
gaaagcgatttcgctcacgttttattagcacaaggaagacagccggctccccgaggcagaagatcgcaggcaccattcgctcgccacccagactctgcgcgcagccccggagccagagaggaggatcgtgaaccgaagccagcttcgcagttctagttttgaaagcgccgctggaaaggggcttaaatccgctttttttttttttaaagggg

SEQ ID NO: 1015 - DNA, 299 bp, Homo sapiens
  misc_feature (1)...(299): n = A,T,C or G
ctttggggagctcctgcattaagtcagactgaggaagccagagctatgcagttctccagctcatccaggacatcagatgagaatgtggactatttgttcaaggtcatcctaagagcttgtccggatggtgctgaatggctgangacattctgtatcccgagtctgttccttgcccagtgtgatttctgtgtggctccagaggctcccctgtcacagcaccttgcccattnggtttctttgaggatgatgnctgccttcaccaaataaaatttgctntctttgccctcaaacaaaaaaaa

SEQ ID NO: 1016 - DNA, 238 bp, Homo sapiens
  misc_feature (1)...(238): n = A,T,C or G
caggaaagaaaggaaaggaaaagaaaaatagagagggcaaggacaaggaaaatggctctgtatctaccagtgagacaccaccacctccaccaccaaatgaaattagtcctccacatgctgcggaagaagaggaagatgntgactggtngggaggatactaattgtggaatcntcnaaggcnctngnatggttgngatcnntgaccatnctnanaggtctgacacttaaatgttgattt

SEQ ID NO: 1017 - DNA, 359 bp, Homo sapiens
atgttccccttctctggctgctggaggactgaactgttattgttgctactcctggctgtggctgtgagagaatcctggcagatagaagaaaaatcgtgtgacctggtaggagagaaggataaggagtcaaagaacgaggtggctctcctgggagaggttacggccactgtttaacaaaagttttgagagtactgtgggccagggctcagacacatacagctacatattcagagtatgccgggaagctagcaaccactcctctggagcaggcctggtccagatcaacaaaagcaatgacaaggagacagtggttgggagaatcaacgagactcacatcttcaatggaagtaatagaatca

SEQ ID NO: 1018 - DNA, 771 bp, Homo sapiens
  misc_feature (1)...(771): n = A,T,C or G
gacgtctggggagctcctgcattaagtcagactgagtgccaccatggcaactgcaccgtacaactactcttacatctttaagtatattattattggggatatgggagtaggaaaatcttgcttgcttcatcaatttacagaaaaaaaatttatggctgattgtcctcacacaattggtgttgaatttggtacaagaataattgaagttagtggtcaaaaaatcaaactgcagatttgggatacagcagggcaggagcggttcagagcggttacacggagctactatagaggagctgcaggtgcgctcatggtgtatgacatcaccagaagaagtacatataaccacttaagcagctggttgacagacgcaaggaatctcaccaatccaaacactgtaataattctcataggaaataaagcagacttggaagcacagagagatgttacctatgaagaagccaaacagtttgctgaggaaaacggcttattgttccttgaagcaagcgcaaaaacgggagagaatggagaagatgcttttcttgaggctgccaagaaaatctatcagaacattcaggatggaagcctggatctgaatgctgccgagtctggtgtacaacacaaaccctcagccccgcagggaggacggctaaccagtgaaccccaccccaaagagaaagctgnggctgctagtgacctctttgctctggcccctcatttgacctttcacctntgnctggtggaagcagactttttactggctccttggctttg

SEQ ID NO: 1019 - DNA, 396 bp, Homo sapiens
  misc_feature (1)...(396): n = A,T,C or G
actgaggggacaaacaagtgactcctgtcacccctctgggtgccccttanaggccatccagcccaacctgaccaatgtccacagccagggaacagccaatcttcagcacccgggcgcacngtattccagatngaccccactacaaagcggaactggatccccgccggcaagcacgcacttaccgtgtcctatttctatgatgcaacccgaaatggtgtaccgcatcatcagcatnngggggngccaaggccatcatcaacagcactggtcactcccaacattgaccttcaccaaaacctctnagaagttcgggcaatggggcagacagtcnagccaacacttgtctacggcctaggctttgcctctgaacagcagctgacccagatatatttgtat

SEQ ID NO: 1020 - DNA, 384 bp, Homo sapiens
gacgtctggggagctcctgcattaagtcagactgagaagatggacgacatgtcgcccaggctgagagcctttctctctgaacccattggggaaaaggatgtggcctgggtggatggcatcagccgtgaacttgccatcaatttggtcaccaaaggtttcaacaaggcctatgtcctgcttgggacagtttcttctgatgcacaagaatgaagcagagttccagaggtggatcatctgctgctgtggagctaccggagtgtgaggcccgccagagctccacctgcctgaaggagtggtgctcctgtttcctatagatatctctggcctggcagctctacctcagataaaggctacccatgctacctacagacaaccaaaaaaaaa

SEQ ID NO: 1021 - DNA, 443 bp, Homo sapiens
  misc_feature (1)...(443): n = A,T,C or G
gaactgaggttgcttctataactggatcacgagtttgctgcacaaagtaccatgtctcgatcccggcagcccccacttgcgtgagctgtgncntccatagnanggatgtctaggaatcagatcccanagagncccgggaaggacccnancacnctgaccacnatncanacctgctgtngctgntcntngaccttnatcaaatcctatgtnaagagggcgtnttgtaaggacggaaggaanattaccctggganaagcnaatgnaanttgggctttantattgtcacaactaaggttgggntgtaaaggaanctcaactgtctcttttaagctactcaagcctgaaaaaataggcattttagatcagtctgcagtgtgggtggatgaaatgaattattatgatatgcggactgacaggaacaaagggattcctcccttgtctct

SEQ ID NO: 1022 - DNA, 398 bp, Homo sapiens
  misc_feature (1)...(398): n = A,T,C or G
gactgagatcctgatggcngttgtacagcgtggagcctgtccaanatgaagagacccctgcctgtgccgatgagtttgacgactttgtcacntatgangccaangangngacngacagngcatatntggggtntgagagcncctacagngagcagtgagaccttcacanangaggacaccagcaccctggngcacccctgagctgcngcctgaaggggacgtggacagtgctggtggctcaggggtgccctctgagtgcctggacaccatggaggagcctgaccatggtgcattgctgctgctcccaggcagntcngtgcttnacgctccnagngtaggtgtttgtgnagtgcgcagtgnanccttntagttcnccantcttgggctaggtgagccat

SEQ ID NO: 1023 - DNA, 107 bp, Homo sapiens
  misc_feature (1)...(107): n = A,T,C or G
actgaggctcagacaagagaaaagctctagaagagaccaaagcatatacaactcaatctctagctagtgttgcttatcaaatnnatgcattggccaacaaaaaaaaa

SEQ ID NO: 1024 - DNA, 462 bp, Homo sapiens
  misc_feature (1)...(462): n = A,T,C or G
ctgagggttccggcgctncccgtgaaaaactngaatggcactggccctgtncacccagccttgctcagggntgaccgngatnctgctgtgtgcagcgtagctgccgangtgcctgacacgagcacccaaacccatcctgcacccaccaccagtangcaaaagcnactgtngaagcctgtgcctgnagtgcccggngtgtgccgaaagaccaanaaaaaacacctcaagaaaaagcaagaatcctgaggatgtggttcggaggtacatgcagaaggtgaaaaaccccgcctgatgaggactgtaccattttgcatgggagcggctgntcacagnatctgggctatgagggcgtgctccgaaaacaagagtgtgcggnccgagcttgtgggccgnctgggccgtnggggncanatgtatcacntggntctgnctggnggccatgtactccaatggcaaaaagga

SEQ ID NO: 1025 - DNA, 416 bp, Homo sapiens
  misc_feature (1)...(416): n = A,T,C or G
ctgggagatgtgacgccacacaatattaaacagttgaagagactgaaccaggtcatctttccagtcagctataatgatgaattctacaaggatgngctagaggttggcagagctagcaaaacttgcatatttcaggngatatagctgtangtgcagtgtgctgcangggntggatcattcacagnaatcaaaagagacctttncntcatgacactagggatgccttgcaccttaccgaagactaggaataggaactaaaatgttaaatcatgtcctaggcatctgtgagaaggatgcncncctttttgacaanatctatctgcatgtgcaggatcagnnagttgagnccagcngattgacnttttacccgggaaagtttggctttttgagattatccgnagacaggagaacaactt

SEQ ID NO: 1026 - DNA, 125 bp, Homo sapiens
  misc_feature (1)...(125): n = A,T,C or G
gaagagtggcagacagaaagaanaggctctggtccaaagagagaggatgtgtctctggaacatggatgccattancaaggatgtttttaataagagttttattaatcaagataaaagaaaaacaa

SEQ ID NO: 1027 - DNA, 349 bp, Homo sapiens
  misc_feature (1)...(349): n = A,T,C or G
ctcgaccctgcctgaccggnctctanngaactgncagtacagttcagncaccttcancncangtgagcgcaagcgaaggcctcatggagaccggaagtcttgtgagatggggctgcagctacgacagaccttcnaggcaggcatnctcacacagctgcacccccgctctcagatcgacatctacgtgcaggtgctgcaagcagatggtgggacctacgcagcatgtgtgaatgcagccacgctagcagtgatggatgctgggatacctatgcgggactttgtatgcncatgttcagctggctttgtggatggcncancactancggacctcanccacgtggaggaagca

SEQ ID NO: 1028 - DNA, 156 bp, Homo sapiens
gactgaggtgtggaaatgtaaactttgctaggagaccagctgtaacagatgtggtcgagttgcagtaatgtgaattgggctagaagatcagagtgtaacatgtgtaatactccaaagtatgctaagttagaagaaagaacaggtaagaaaaaaaaa

SEQ ID NO: 1029 - DNA, 513 bp, Homo sapiens
  misc_feature (1)...(513): n = A,T,C or G
gactgaggttgaagctggaatttgccccttacgagcaagaagatgatgagtgacgctagtgacatgctggccgcggcgctggagcagatggacggaatcatagcaggttctaaagccttggagtattccaatgggatttttgattgccaatctcccacctccccatttatgggaagcttgcgcgctctgcaccttgtggaagacctgcgtggattgttggagatgatggaaacggatgagaaggaaggattgagatgccagatcccagattcaacagcagaagtgcttattgagtggcttcaaaatcaaatgacaaatggncatctacctgggancgganatgtgtatcaagaaaggttggcacgtntagaaaacgacaaggantccctngttcttnangcaagtggtacttgagnccattcctttntnangacangtggnccttncaactttgaatctcatgtatgtgcaacacctgtattaanncacctgaatattacatgccatctaagc

SEQ ID NO: 1030 - DNA, 252 bp, Homo sapiens
  misc_feature (1)...(252): n = A,T,C or G
acgtgttcgaggatgatagggaagggacgatcgggagagatttccatcgatgacattcggataagcactgatgncccncnggagaactgcatggaacccatatcagcttttgcaggggncnccctcncagnnaggnaccgagcccncagggnacncangngcccgttctattncatnccagnctactngtattacgttatggcggccggggnccnccgtgctggtgcttggcgggggggggcctgcccttgg

SEQ ID NO: 1031 - DNA, 322 bp, Homo sapiens
  misc_feature (1)...(322): n = A,T,C or G
gcccttgctgtcagtgcnnagtgaaangaatgcggagttganangtgagganntggctnctacttnagacngacgagctgaatgatgcccctgnttgcgcccncgnaatcanatgacagcgaggacactcccagcangctcttcggggccagaggaaacacanncttaccagatccaggaactnctgagcagnaccaggtctgtcagncccatcccanctttccagttgngccacagcctcttctgacggcacaacagttagccctttgctgtgncccggggcgatgccgnnaggccccccatccctcaatcaggcaatcct

SEQ ID NO: 1032 - DNA, 348 bp, Homo sapiens
  misc_feature (1)...(348): n = A,T,C or G
aatcaggaatgattctccatcccagagagatgaagtaattcaatggttggccgaactcaantaccagttcaacctctatncagaancatttgctctggcangcagncttttggataggtttttagctacagtaaaagcccatccaaaatatttgaattgtattgcaatcagctgtttttttctggctgctaagactgttgaggaagatgagaaaattccagtgttaaaggtattggcaagagacagtttctggggatgttcctcatctgagattttgagaatgggagagaattattctggataaatngnattgggatcttnacacggntacaccattggatttttctt

SEQ ID NO: 1033 - DNA, 162 bp, Homo sapiens
  misc_feature (1)...(162): n = A,T,C or G
ggctctggcggccactgggaaggaggagggcctgagcgcccggctgctggccctggtgggntctgntctttatcgntggnggcattatagggaagantgccttgnangggccgatgcgaaggatggcaggntggattganggatctaccacaccatgggatt

SEQ ID NO: 1034 - DNA, 295 bp, Homo sapiens
  misc_feature (1)...(295): n = A,T,C or G
ctttggaagaagaaccaggatgactttgagtgtgtgaccactcttgagggccatgaaaatgaggtcaagtcagtggcttgggccccatctggcaacctcttggctacctgcagcagagataagagcgtgtgggtctgggaagttgatgaagaggatgagtatgagtgtgtcagtgtcctcagctctcatacgcaggatgttaagcacgtggtttggcacccgagccaggagcttttagcttntgctagctatgatgacacagngaagctataccaggaagaaggggatgactggg

SEQ ID NO: 1035 - DNA, 219 bp, Homo sapiens
  misc_feature (1)...(219): n = A,T,C or G
gactgaggttgtggagcatggcctgtttgtcangcactgcacngtggaagtgtatttgctgganctgaagctctgtgagatcagtgaccccaccantgtgctaagntgccattttagcaaagcagacaccattgcaactattgagaaggagatgaggaagctcttcaacatccctgcagaacgtgaaacacggctttggaacaaatacttgagcatcac

SEQ ID NO: 1036 - DNA, 519 bp, Homo sapiens
  misc_feature (1)...(519): n = A,T,C or G
gtctggggagctcctgcattaagtcagactgagtcctaacaggggctttacagaaatgcactgtatgagcggccactctaattttgtgncttgtgtgtgtatcataccctcaagtgacatatatcctcatggactgattgccactggaggaaatgaccacaatatttgcattttctcgctggacagtccaatgccactttatattttaaagggtcacaaagatactgtttgtagtctttcttctggaaaatttgggacattacttagtggctcatgggacaccactgctaaagtctggctgaatgacaaatgcatgatgacattacagggtcatacagcccgcagtatgggcagtaaagattttacctgaacagggcttaatgctaactggatcagcagacaagaccattaaactatggaaggctggaagatgtgagaggacttttttagggcatgaagactgtgtaagaggcttggcaatcttgagtgagacagaatttctttcctgtgcaaacgatg

SEQ ID NO: 1037 - DNA, 431 bp, Homo sapiens
  misc_feature (1)...(431): n = A,T,C or G
tgaggtgatgctgggagcagaactccaaaagnccagaagcttcgtgaagctatggctgccttaagaaaatcagctcaagatgtccagaagttcatggatgctgtcaacaagaaaagcagttctcaagatctacataaaggaaccttgggtcaggtgtctggagaactgagcaaagatggggacctgatagtcagcatgcggattctgggcaagaagaggactaagacatggcacaaaggcacccttattgccatccagactgttggnctaggantanaatacagagtgaangactgacnaccaaggaccnagtntgctatccagggaaccatagtgnctatnatnaccacccttccgctnactatgctgnttgaggacanccgantggtgnccaagtacaaagatggaaatcangcctggctttatgctgg

SEQ ID NO: 1038 - DNA, 386 bp, Homo sapiens
  misc_feature (1)...(386): n = A,T,C or G
tggcactctcttttctgctcttaccctgcnncaacattcctttccagggacagccngntgananctnttcacggagtgntgnaccntgangcgangantttaaaagttgnggcttgaaagacaggaagatacggatggcttcctcgtctggcaacagacgatgatntcactatccccagagctgntntnaatatgatgatcaaagagactcttnctaatgtccgggtggccancgatgcccgagagctggtagtgaactgctgcacggaattcattcaccttatatcttctgaagccaacgagatttgtaacaagtcagaanagaagactatttcaccagagcatgttatacangcactggaaagtttgggctttggctcttacat

SEQ ID NO: 1039 - DNA, 253 bp, Homo sapiens
  misc_feature (1)...(253): n = A,T,C or G
ttcctaacatgcttgagttncgaaccagtnttncttggagatgaacnctntttngcaagagcgaggnncnnaaancnttnnctttcaggacatggaatctgaattggagaanacagaagctnagctcaatgcagnagtcagagagaaancatctctctctgcgagtaatgcttcactnggaaaaacggnttactgaattaaccagagccaacgagctactaaaggctaagttttctgaagatggtcaccaaaa

SEQ ID NO: 1040 - DNA, 127 bp, Homo sapiens
  misc_feature (1)...(127): n = A,T,C or G
gactgagatgggagatctttggtcagcncnncctatgaaggtgaatgcttcccaggctcgtcagtttaaaccttgtattaagcaaataaatttccctacaaacctcatacgactggaaaaaaaaaaa

SEQ ID NO: 1041 - DNA, 408 bp, Homo sapiens
  misc_feature (1)...(408): n = A,T,C or G
gacatggtgttactgtggagtttatgataatgccttaaacaatgacaactacaaccttgctagaggcttcaattaccaccaaggacctgagtggctgtggccaattgggtattttcttcgtgcaaagttgtatttttccaaaatgatgggcccagagactgctgcagaagactgtatngtttggttaaaaatgttctttctagacattatgttcatcttgagagatccccatggaaaggccttccggagctcaccaatgagaacggccagtactgccctttcagctgtgagacacaggcgtggtcaatggctgntgttctggaaaccctctatgatttatagttggctcataaatagtaattgtgtgaacacttgacattattgaatgcaaggtcataaagaaatgta

SEQ ID NO: 1042 - DNA, 433 bp, Homo sapiens
  misc_feature (1)...(433): n = A,T,C or G
actgagtctccatgaagtgccaggagcacccgtgcgtgtcccctgtctctaatcatgtgtatgagcggcgactcattgagaagtacattgcagagaatggcacagatcctatcaacaaccagcctctctcagaggagcagctcatcgacatcaaagttgctnacccannncgacccaancctcnctccgccaccancntcccagccatnctgaangccttgcacanatgagtgnnatgcaggnnatgctgcacaggtncactctncgccagnaactgctgacaacccggcaggagctgnnccatgctctgtaccaacacgatgcttgcctgccgagtcattgcccggctnacnaaagaggncactgcngctngagangctntggctactctnaanccacangctggncttatttgtacctcaggctgtgccaa

SEQ ID NO: 1043 - DNA, 111 bp, Homo sapiens
aactgagatccggacatggtggcagtgttggaagtgatctccagtctggagagataccccatcaccaaagaggcactggaggagacacggactagggaagctcatcaatga

SEQ ID NO: 1044 - DNA, 495 bp, Homo sapiens
  misc_feature (1)...(495): n = A,T,C or G
gactgagagactgtgaatcctgcaggatgactgaatgaacccttgattcacggacatgccggaggagttcaacatgggcacacacgactgtcacagacggcagattcngntnctacttgngggngnngaaganntagcctntctacangttncannnngatnnaagggagnacntngntgntggcggaacacctgacttccaggcaactagggtgaggatcttatacccatacccactgtgacacaaccattccaaccaggtcacacctattccaacaaggccacacctccagatggtgccactccctggtccaaggatatacaaaccatcacattccactccctggtccccatagacttgttcaaaaacatgagtctatgggggccatacttaaacaaagcataatgcaaaatgcatttagtccaactttcaaagtcctcatagtctatagcagtccgcaacaacattaaaagtccaaagttcaaaaaaaaaaa

SEQ ID NO: 1045 - DNA, 423 bp, Homo sapiens
  misc_feature (1)...(423): n = A,T,C or G
gactgaggaagccagagctatgcagttctccagctcatccaggacatcagatgagaatgtggactatttgttcaaggtcatccttattggggactccaacgtggggaagacatgtgtggttcagcatttcaaatctggagtctacagtgagtcccagcagaacaccattggggtggacttcaccgtgcgctccctcgagatagacggcaagaaagtgaagntgcnagggtncacacacggnaggncangagcnctnccgnaccatnacccaaagctactaccggagtgcccacgcagctatcatcggttatgatctcacacggcggnccacattnaaatctgtccctcactggatccacgagatagaaaaatatgggagctgccaactngntcatcatgctgatcgggaacaaatcagacctg

SEQ ID NO: 1046 - DNA, 166 bp, Homo sapiens
  misc_feature (1)...(166): n = A,T,C or G
taagagtgagctggtacagaaagccaaactggctgagcaggctgancgctatgatgacatggctgagctatgaaggccnnaacagancagggacacgaacttttccaatgaagaagaggaattctactctnttgttgcctacaanaacggtggtaagggggccccg

SEQ ID NO: 1047 - DNA, 206 bp, Homo sapiens
  misc_feature (1)...(206): n = A,T,C or G
tcgtacgctctcaaccagagactatagcatgtgctngnatctaccttgcnngtagagcacttcaaattcccttgccnactcggncccantggnttcttctgtttggnaccacagaagaggagattnaggaaataatgcatagagacgcttagactntataccatggaaaaagcctaactatgaatgagctggaaaaggaagtagaa

SEQ ID NO: 1048 - DNA, 277 bp, Homo sapiens
  misc_feature (1)...(277): n = A,T,C or G
aggccgaaggactgaatnttccataatacatncttaaaaccttcaagaatggttctagcagatcttggaagaaaataacatcagcattacngctcattgagcantgccaccattatcaatgaagaggtatttaaatngctattgctgaaagaaagtatgtccagcatttattggaagcagatgttattattaacntagggaagcacctcagaaaaatgttaaagcctggcatttggttcttgaaaanatggccttcngggggggggccaaaaaaaaa

SEQ ID NO: 1049 - DNA, 151 bp, Homo sapiens
  misc_feature (1)...(151): n = A,T,C or G
cgcagttactcttttcatgtataaagcagggatgctgnatctacctcacacgggtactaaaagcaaaacacgggaatccaaagccctggggcacatgcccgacatctgaaaagctggnggtttctcccacctcccttccgagtgcatgctg

SEQ ID NO: 1050 - DNA, 471 bp, Homo sapiens
  misc_feature (1)...(471): n = A,T,C or G
gatggaagcgtccagactccggcagaaggcagaggagctggtcaaggacagcgagctgtcaccaccgacatctgccccctccttggtctcctttgatgacctggctgagctcacaggacaggatacaaaggtccaggtacatcctgctaccagcactgccgccaccaccaccgccaccgccaccacgggaaactccatggagaagcccgagccagcctccaaatctccgtccaatggcgcctcctcggactttgaagtggtccctactgaggagcagaattcacccgaaactggcagccaccctacgaacatgatggacctggggcccccacccccagaggacaagcaacctgaagctccacctgcagcgcctggagaccacccttagcgtgtgtgcagaggagccagaccacaagccagctnttnacccacctgggccgcatggcctntagtttaaaaaaggtgggcccc

SEQ ID NO: 1051 - DNA, 217 bp, Homo sapiens
gactgaggaaaggcctggaagaagaggccaccaaacaacccaaccctctctccagtcccttgatctactcgtcgcctgcatctggagacccaatggcccaagcctactggcagtgctacccctggcttattctcctctgtgcatgtgcctggagctacccagagcccaagtaccttggaagggaagatgtgagaaactgttcaaccagccctgaggc

SEQ ID NO: 1052 - DNA, 168 bp, Homo sapiens
gactgaggctccagccttcccccagccctggttgaaatcctcagtggttattcatgaagacgcacccaccatgttttatgggactcattgcattactagtgtaagataaacctagttgtattcatttcttgtggctgatgtaataaatttaaaacaacaacaaaaaaa

SEQ ID NO: 1053 - DNA, 408 bp, Homo sapiens
  misc_feature (1)...(408): n = A,T,C or G
ccagcacctaaagaaggtcctatgccagttntggcacttatgtagtgtttagaggcaggcagcagggggcctatngtccatgtggacacacacttcatccaggctgncctactctcccgcccttgggcttccttggcctntgatganttnggctgatggccaacacctcacagccatgagaccgagcaaaaagagactggggantttctcagctggctttcgcccttcctcanaggagtnggcccttgggaccttgccctgaaagctggtgatcgctgnnaaccccaccatncctccccaanggccttnatgggcacgggcccatgatcttnacctggtttnagccctgagcgccntgagtgcccgggcgncngganctacctggtttttagggaggattcttggatg

SEQ ID NO: 1054 - DNA, 452 bp, Homo sapiens
  misc_feature (1)...(452): n = A,T,C or G
acacagcacctgcctttgagggccgcncggagatctgataatgccctcaaggctggntgnctatgctgntgaaagctaatgaccatgagctggctcaggccatnctganngnagccagcatcaccctgcctcatggaacnctttnnnaatgctatagacgagcnggccaaccgcttataaacctgcaccatctattgncctgtccccacctnntngaacttgctgctgcancacacaggaggagganagcctgtatcctccccnagcccacccctagtgngcgccgngaattcccactgaaagtgcgcctcttccacaggcaaggacgngaggntnaatgccagcctgcctgacaccggggggggcaactnaagaggcagctggcccagccnggagggcatttgagccnttcctggcananatggttnttttttgggaaagctgcttacaac

SEQ ID NO: 1055 - DNA, 428 bp, Homo sapiens
  misc_feature (1)...(428): n = A,T,C or G
ataggagcagaatgttcagcagaggcctacatacnnaanactctcgagggaacaggcttgccatttcacagttgatgagagttctgtggctgggaagagagtcgacagtaacgaaacagtctcgccatcttcactgccttcatctgtgagaactgctgggctaaagcccgaaactggacccctcatgttttggtcacagcaaaatatcacagaacagggttactctgacaactctctgtccagagaacttacacttctgtctgcctgcaatgctgatagttgtcagatgccaaaactccactgccaccgttcaccaccccctttgccaccaaagaaatactctacagccagngcaccaaggttagagagagttggacttagccctgatgtcggggttaccgaggcgtttaacactaatccctccagcc

SEQ ID NO: 1056 - DNA, 306 bp, Homo sapiens
  misc_feature (1)...(306): n = A,T,C or G
gaaagcttgaggccttccccanctggcaaaaatgaagaaacagatccaccccgttcctcctcaggggngggnnactttntctttancaccatttcccacaatgccaagccacacgggnccccttgccntnatcccnaccttatgattctttatccttggcttgggaanaacagccttccttttaagcctcccccaaagtcccctctttggaacccaaggtttnaagggnggggggggntcctaaaangtntntccnaagcctcataaactcttaatggaaactcaggaacccttggattggacccc

SEQ ID NO: 1057 - DNA, 474 bp, Homo sapiens
gtgtatgtgtcttacaactatggaaaatcattcagtaagatttcagagaagctgaactttggcgtgggcaacaacagcgaagctgtgatctcccagttctaccacagccctgccgacaacaagaggtacatctttgtggatgcttacgcccaatacctctggatcacgtttgacttctgcagcactatccatggcttctccatcccattccgggcggctgatctcctcctccatagcaaggcctccaacctcctcttgggctttgacaggtctcaccccaacaagcagctatggaagtcagatgattttggccagacctggatcatgattcaggaacacgtaaagtccttctcttggggaatcgacccctatgatcagccaaacgctatctacattgagcgacatgaaccctttgggttctccacagtgctccgcagtacagacttcttccagtcccgggaaaacccagccggg

SEQ ID NO: 1058 - DNA, 126 bp, Homo sapiens
ggaagaaagctcgcacatttgacttggaggccatgttcgagcaaactcgaaggacagcggtggaaagaagccggaaaacactggaagcaagagaaaaagaggaagaaatgaacagaaacaaaaaaa

SEQ ID NO: 1059 - DNA, 283 bp, Homo sapiens
  misc_feature (1)...(283): n = A,T,C or G
agagaagccagccaaagaatgtctcgtggtattccagccgattcttcccacttccgatgggttaagccaccgttactgattcgcatttggtgtttgctattggactgaacctgctgatatcctgacatgaagcttagagtcgatctaaagaactacttctaaacaggtccacaatgcccttgtcctagtaaccgtatctctcccctacctctggtcggtgctctagaagggagattgatgcattgnagaaccccaaataaaataggctttggaaaaaaaaaaa

SEQ ID NO: 1060 - DNA, 434 bp, Homo sapiens
  misc_feature (1)...(434): n = A,T,C or G
ccaggtcccagtgataagaaatcagaactactgccagctaagtggaacagcaataaagaactgtatgccctccggtatgagtctaaggatggagccagaaaactccttctgaaagctgtctctgtggagaacggcatgatcatcaacgtgctggaacttggcacacagcaggtggcagacttgaccctgaacttagatgattatattgatgcagaagacctgagtgacttccacaggacctataagaacagtgaggagcttcggtctcagatcagatctggaattatcacacctatccatgagcagtgggagaaggctcgtgcaaacagtcctccgagggagttcccacctgccactgccagagaggnggacccactccagatttcctcacaccgncctcatactancaggcagcctgcttggcgtgatcccct

SEQ ID NO: 1061 - DNA, 405 bp, Homo sapiens
  misc_feature (1)...(405): n = A,T,C or G
ggaagaaagctcgcacatttgacttggaggccatgttcgagcaaactcgaaggacagcggtggaaagaagccggaaaacactggcggaaccagtatttggaaggctgggccagaggtggctgtcaccattgcttgttgacccagacagtatagaacattgtgacacacactgatgtggctgctgctgttgaatccctgctttaatgagctgtaggagatacttaatgaagccttacttccagatggcttttccagatggttggcagttctaggaaccaccttagggtctccagagaacactggcagtgngctttttttggctctaactcagatctctcttgtactagaggacggtctggagtctgggaacagctggatttaaatcaagtgctgtgatagtacttg

SEQ ID NO: 1062 - DNA, 101 bp, Homo sapiens
ggaagaaagctcgcacatttgacttggaggccatgttcgagcaaactcgaaggacagcggtggaaagaagccggaaaacactggaagcaagagaaaaaaaa

SEQ ID NO: 1063 - DNA, 433 bp, Homo sapiens
  misc_feature (1)...(433): n = A,T,C or G
gtcggatcataaggcagccttctgtcagtctgctctgccccttccctcgaggagcgccctgccttgctgactttctctgcctctggcttcctgtgataggtggtgtcattcccctccaacctgagtgctggcaggtacactgctggccaccagcagatgcccatgaagatgctgacaatgaagatgctggccctgtgcttggttcttgctaaatcagcctggtcggaggaacaggagaaggtggttcatggaggcccgtgtttgaaggactcccaccctttccaggctgcctctacacctcaggtcacttgctgggngggggggcctcattgacccacagngggtgctgacagctgccactgcaaaaaaccgaatctgcaggngatcttggggaaacacaaactacggcaaacagagacttttcaaaggcaaa

SEQ ID NO: 1064 - DNA, 436 bp, Homo sapiens
gtggggtctttcacccgtagccgactcttcaccttcccgtaaccgcgtctcttaccggtgatggcggtgaactgctggattaaccccttcagcgccgacgacgccgcggagcccccgtgggcagccatcttaccgccgccgccgccgccgcggaacaacaacacagacacacacggggctccctcccccactccgcggcgtgctgtgcgcaggcgcactggcaggcccgaagctccgccctctccctgtctgtgcgcgttttgcgcaggcgtactctccgcgagccgccgctttggtttgaagcctgtgctgctggctggtagctattctttgaaacatttggtgccttctctgaattccggagatatcctcctaagtaccgcattgaatcccaacatcccaaagaatcttcggacctgaaataccaaactcttgg

SEQ ID NO: 1065 - DNA, 177 bp, Homo sapiens
aatgggagctgactgacatggtggtgtgggttactggagcgtcaagtggcattggcgaggagctagctttccagttatctaaactcggggtctctctggtgctgtcagcccgaagggcgcaggagctggagcgggtgaagagaagatgcctggaaaatggcaatttaaaaaaaaaaa

SEQ ID NO: 1066 - DNA, 352 bp, Homo sapiens
  misc_feature (1)...(352): n = A,T,C or G
gttaatcctgccatacgaaagatttattaagggagaagaagataagcctctgccgccaatcaaggcctcngcaaactngaatgccctgcgaggccnaaatgagantnaancaaaagtctcgggaaacanacgtancngngnggactacgcccccttttgagnaagaaaaaactggctaagtccaagctgaattggcctcgctggccatttaaatggcgcgccctcgaggaattnggatccggcgcgccatttaaatggccgctatggccaattcttttggtttttaccctggaagaaatactcataagccacctctgttatttacccccaatcttcacaagaaaaactgtaa

SEQ ID NO: 1067 - DNA, 434 bp, Homo sapiens
gtttattgaaaatatggcataacagattaaacagctccacgtggtgttttgaaattcatgccaactgtaggctgagtgacctgaaggttagagagactgccaaagtccaggagcttcagcatctccttggtgtcgggatccacctcaatgatctcctgatctagggctgagacctcaggaacgtagttatctctcctctctctctcttcttcctgcaacttgatagagatgcctctcacaggccctctctgaatccgcttcatcagatgcgtgatatagccggctatcttgttccgaagcttcttgctggggatgatggcgatctcctcgcacacgcgcttgttggtggtgaaagcattacccagacgcgtgtagtacttctagatgatgacccgggcagccttcttcacggtcttggtgcgaaccagcctttt

SEQ ID NO: 1068 - DNA, 363 bp, Homo sapiens
  misc_feature (1)...(363): n = A,T,C or G
gcccgtgggattgacgtgcaacaagtgtccttggttataaactacgatctacctaccaatcgtgaaaactatattcacaggagtcgatagcggcagttgatgacgagatggcactcagaaacggcgttgacgtaatttaggacgtggaancataagcgaaacagcacactgtttgaacaaagagcgagtcgaattggcagagggggtcgatttgggaggaaaggtgtggctataaactttgttactgaagaagacaagaggattcttcgtgacattgagactttctacaatactacagtggaggaaatgcccatgaatgtggctgacctaatttaatccctgggatgagatagttttgaatgc

SEQ ID NO: 1069 - DNA, 333 bp, Homo sapiens
atgatttcctgctaaatgggagcctgggactgggagggctcctcctcctgcttgtcatcatcctgttcatctgcttgtgccggttcagccagagagtgaagagactggaaaggaatgcccaggtctcagggcaggagccccactatgcatctctccagcagctgccagtgtccagtagtgatatcacagacatgaaagaagacctcagcactgactatgcctgcatcgccaggagcacacccacttgagtgcccccaaaagctctcctcgccctgggtgcgtgctcagtcacactatggtcatctagtaaagtctggttccccacttctgaaa

SEQ ID NO: 1070 - DNA, 528 bp, Homo sapiens
agtttgtgagaagcttctataatggtctgcttggctctcgtcagagctgcctatgagcacatctacctggtgaggaaggtcagtcatgcctgcagatgccatcaacatcgggcttggagctcaaagccagctgcatcacagtctgctgtccagggtgctccaggcagtgtgctggagatacttggtaaatcctaccctcaggatgaccacactaacctcacccagaaggtcctttccaaggtgggcaggaacctgcacaaccagaagttccaccctctgtggctgattaaggagcgggtgaaggagcacttctaccagcagtatatggtgcgatccaggacacctctattctccgtctatgaccagcttcctccagtggtcaccacctggcagaactttgatagcctgctaatcccagctgaccaccccagcaggaaaaagggggacaactattacttgaatcgggcacacatgctgagagcacacacatcagcgcatcaagtgggacttgctgcatgcgggacttaa

SEQ ID NO: 1071 - DNA, 513 bp, Homo sapiens
  misc_feature (1)...(513): n = A,T,C or G
ggccaagctcagacattacggagcccagagccagaggcgatggagctgagccaccgacaaggtacaaccacgttgacaaggacacacccgaacgacaaggagggccagcaggacatgaactccttcagagctaaccatagctccttggacaactccaaatttaagtaccatgcaaggctctcccagagccccttaggcagctccctgggccagggctacctggagactccacctctaccaccaactcctacctgcaggacttctctgnctatgaactcccatcctgaggacctgaagaaggggcatccagatccagctcgagagatgccagggagaccttccgagagggatgtgtcgggggaggaaggncaagacttcaggtcccaaaacaaangacaggggcctttgaccaagaaggacagggtcnttcttgaaacatccgccccaaanttgggagcaagatgggggaccaactgatctttgaggatnagctcgacaggccattggtgaaaa

SEQ ID NO: 1072 - DNA, 518 bp, Homo sapiens
  misc_feature (1)...(518): n = A,T,C or G
aaaactagaaaagagaagacaaaatcaaagaccgaagaagcaacagaaggaatggaagaggccgtttcctccaaagcaaagaaaacaaacaagaaagggccttctgaggatgatgtggatccccctaaatccaggaaggccaagaagcaggaggaggagcctcaagacgacactgcttctacaagcaaaacctccaagaagaaaaaggagccccttgagaagcaagcagactctgaaaccaaagagataataacagaggagccttccgaagaagaggcagacatgcctaagcccaagaagatgaagaaagggaaagaagcaaacggagatgccggagagaaaagccccaagctgaagaatggactctcccaaccttccgaagaagaggcagacattcctaagcccaagaagatgaagaangggaaagaagcaaacggagatgcttggagagaaaagccccaagctggaagaatggactntcccaaccttccgaagaaaaaggtagacattcctaagcc

SEQ ID NO: 1073 - DNA, 278 bp, Homo sapiens
tgcccccccaggagacaaagagcctcatgaaggcttcctacacgcccgaggtgatagagaagtcggtgagggatgtggaacactggcacgggaggaagacggatgacctaggccggtggcaccggaagaatgctatgaacatgaacttgcagaaagcgctggaagagaaatacggagagaagagcagatccaaggccaagtagttgaaaggacattgggaggaagcttgagaatgttgccaataaagaaataaaggctgtggtctgcaaaaaaaaaaa

SEQ ID NO: 1074 - DNA, 423 bp, Homo sapiens
tgctgaagacagcgcagaatcaccccatggtaagcactctgggccacctcccttcatgtgcccacagctcagtcttttgcagttcatgattgaaggcctggcaagatggctcagtgggtaaaggtgcttgctgccaagccgaaggacctgagttcaatccccaggacccatgtgatgatggaggggttcatgacttccctgaagttgttctctgccctgtctgcacacagacagaatggcaaatgcaatacaaaggaaaacgttcacaaagaaatctatagccggcatggtggtgcacgcctttaatccccgcacttgggaggcagaggcagcgaatttctgagttcgaggccagcctggtctacaaagtgagtgccaggacagccagggctacacagagaaaccctgtctcaaaaaaaaaaa

SEQ ID NO: 1075 - DNA, 198 bp, Homo sapiens
  misc_feature (1)...(198): n = A,T,C or G
cttgttacctaaaaccccgggcagaggaggagaggagantagcagcggaggaaaagaagagacangggngggggggncaatttngtttggatttgacggggcgcncannntgacanaanngncaagtgaggcgtcagcgagcttgcttttctctagtcgttgagaacgaataaagcttcattgtgcgaaaaaaaaaaa

SEQ ID NO: 1076 - DNA, 277 bp, Homo sapiens
gtgtataggtgtgaaccaagtgcacgtctagttcccttggaggccagaaagaaggcggtgtcagatccccaggaaccatagttacagatggttgtgtagtctcccctcccccagcctgaatcctgcttgctcaggggtggagcttcccgctcaatcgttcagccatgcccactgctggaagctgccgctttgctgttcggagccggagccgtacacgtggtcaccctgctattggaccccaagactaattggcgggaatcggccccttcccctgctt

SEQ ID NO: 1077 - DNA, 410 bp, Homo sapiens
  misc_feature (1)...(410): n = A,T,C or G
gtgtataaggtgtgaaccaagtgcacgtctagttcccttggaggccagaaagaaggcggtgtcagatccccaggaaccatagttacagatggttgtctcctgtagctcaacctggcctggaattctctatgtagctgcaagtgaccctgaccttctgagtcttctctaccttccagtgtagtctcccctcccccagcctgaatcctgcttgctcaggggtggagcttcccgctcaatcgttcagccatgcccactgcnggaagctgccgctttgctgttcggagccggagccgtacacgtggtcaccctgctattggaccccaagactaattggcgggaatcgggccccttcccctgctttataattgcgtgtggaacagtaaaattgagctttgatcagaaaaaaaaaa

SEQ ID NO: 1078 - DNA, 521 bp, Homo sapiens
  misc_feature (1)...(521): n = A,T,C or G
gggtggtaagggtggtggaaacccangtgccncgtcttaagtttccctttgggaaggcccagaaaagaaaggcgggnggtcaagaatcccccaggaaacccataagtttaccagnatgggttggatgttttaaaccctcaagacagggatgggggcttgggggcttgggccaacaacttgctcaacattcttctgagtctgacgggctggtggagtgtgagcgtggctcctaaatttcttgggtaggactgaagaagcacttttaagatgtggaaactcagagaggatgccactgttttgaactattttgaaggcacagccaccagagctttaggtcagaagaggtccttggaactggaattacaggtggctgtgagcctccagggacagggtattttatcacagcaacagaaatgaaaccaaaacaactccacaataaaattcttgggtttcttggggccaagaagatgacacgataaggataaagacactggccaagcatgaccttcagagtttggccc

SEQ ID NO: 1079 - DNA, 508 bp, Homo sapiens
attgactcgtggtgcaaagacaacagctatgtgatcgctggctattaccaagctaatgagcgtgtgaaggatgccagcccaaaccaggtggcagaaaaggtggcctccaggatcgcagagggcttcggtgatgccgcactcatcatggtggacaatgccaagttcacgatggactgcgcagcgcccacgatccacgtgtacgagcagcacgagaacaggtggcggtgcagagacccacaccacgactactgtgaagattggccggaggcacagaggatctcagcttcactcctggacagccgctcctacgaaacactcgtggattttgataatcatctggacgacattcggagcgactggacaaacccggagatcaacaaagcagttctgcacctgtgctagacaaggaccacactacagcgaagacggaagcatatttttacatttatagaggaatagtaggttagccggaagggaagctgcaagtgtgccttggagggggtgccgg

SEQ ID NO: 1080 - DNA, 532 bp, Homo sapiens
  misc_feature (1)...(532): n = A,T,C or G
gactgaggaatagaagacatcttaagtaggggctcaagagctggatagcgtcatcaagcaagggtacctggagaagaaaagcanagatcatagcttctttgggtcggagtggcagaagcgctggtgtgttatcagcagagggctcttcctctactatgctaatgagaaaagcangcagcccaaagggaccttcctcattaagggctacagtgtccggatggcccctcacctgcgaaaagattccaagaaagaatcctgctttgaactgatctcccaggataggcgcagctatgagtttacagcntctagtncagctgaagccagagactgggtggatcaaataagtttcttgttaaaagatcttagctccttaaccattcccttcgaagaggaggaggaggaagaggaggaagaagagaaagaagaggaanaaatgnacaatgacgtcgatggctttgactccccaaggtctggctcccagtgcagagccatggccttgcctgagcctactgagaaagaggaggacatttat

SEQ ID NO: 1081 - DNA, 326 bp, Homo sapiens
  misc_feature (1)...(326): n = A,T,C or G
gcttctgcaaagagagtcccagccttgccacgaggcggaagtgactgagctgccacatccttcanngtggagacatccagaagacagacaacttggccagagggaaatgaaggtgaagagaagccgaggagattggaatctagtgccgaatttgcatccgatgccgagcctaggangtcanagaagacctagggtacaaaagaggaagnagcaaaggggaagntcttccttctgatcccctctattaggtggaggacctcggnggngagacctccgccttctgctctgtatcgctgcacttgantaccataagggggagccctacc

SEQ ID NO: 1082 - DNA, 210 bp, Homo sapiens
gccgcccgtgcgtggattgccacgcatttgaattcatgcagcgcgcccttcaggacctacggaaaaccgcctacagcctggacgcacggacggagaccctcctgctgcaggctgagcgccgggctctgtgtgcctgctggccagctggacgctgaagatctttggccagtgatattccttgtcaataaatgcctgctagcaaaaaaaaaa

SEQ ID NO: 1083 - DNA, 495 bp, Homo sapiens
aaaagcttcactggcctgaacatgaacttgctaagaagtttgttctaaatgcagaagaggcattgatcactgacagcaaaagaagcttttcgagtttgtcctctgggattctcaaggacactttcacaactggaaccagtagttacaatgttctactacagagcaaggaggagaaaaagcaccgttcacaaaagcggttttcctctgccagctccaaacaacataggaagcccagcaaatctcctagctcctctcatagcaaagatcctagcaggatgacagccctggtgcctgggacaggcgctggcacttggtactgcctagacgggcagtctgctgtttttgttactagctcagtaccaagtcctgtaaaggtcacccgtgatatctctattacaggaagcggcctagcactgccacctaaaccaaatagcaagggcaaacgacgcaacctgacccggcttccaaagccaaagcaacagcctcagctgtgta

SEQ ID NO: 1084 - DNA, 147 bp, Homo sapiens
  misc_feature (1)...(147): n = A,T,C or G
atgagaagacgagaacaaagaaagttgataatgaactcaaccctgtctggaatgagattttggaatttgacttgagggggataccactggactctttcatctttccatggtggattgttgtcaanagattttgagacaattggacca

SEQ ID NO: 1085 - DNA, 303 bp, Homo sapiens
  misc_feature (1)...(303): n = A,T,C or G
gctctgggtgctctaggatgagcgctacacatctgtggcttttgggtataaagactgtgcggcttattaccaagccgcaagcccaagaaccaaggtagatgccatccacacccctgttctctgcctcaatgcagcagatgaccccttctccccagtccatgccttccctctgcaggctgcccagaagtctccctatgtggccctgctcatcacaagctcggggtggccacattggcttcctggaaagggctgatgccctggcaacactgntacatgaaccggggactaaattaatatgcccaa

SEQ ID NO: 1086 - DNA, 391 bp, Homo sapiens
gtgttttgtctgcatgtatgtcagtgctccacaggcatgcttggtgcctacggaggccagaagaggacatcaggtcccctgtgagttacagatagctgcgagctgccacgtgggtacttagaattgaactcaggttccctggaagaacagccaatgctgttgacttggtcttgcctcaccacctgtctttcctcagtccatgagtgttgccttagcaaaactccacgtgcgtctttatctgacatcgttctatcggtcagagtctttggaagaggcaagaagccgcaggaatctctccatttatttctctctatgagtcttgaccattggagctcaacaacgcatgtaaagtgaaccaatacatgtgtgtcattatcgaagaagaaaaaaa

SEQ ID NO: 1087 - DNA, 525 bp, Homo sapiens
  misc_feature (1)...(525): n = A,T,C or G
gtaaaatatgaagttacagaggatgtatatacttccaggaaaaaacaacaccagaccatgatgcattatttttgtgcactaaatactcttcagtacaagaagaaaatagctttgttagaacctctactgggatacatgcaggctcagataagtttctttaagatgggttctgaaaatctcaatggacaactggnagaattcttagctaacattggaacaagtgtacagaatgttcgaagagaaatggatggtgatgtagagaccatgcagcagacaatagaagacttggaggtagccagtgaccctttatatctgcctgacccggatcccaccaagtttcccatcaatcgaaatttaacccgaaaggctggatacctaaatgctaggaaatcttcaatattgcaagcagagagtaaaaaggaccatgaagagtggatctgtacaataaacaacatatctaaacaaatatatttgagtgaaaatccagaggaaactgctgcacgagtgaatcaagtctgctctaga

SEQ ID NO: 1088 - DNA, 324 bp, Homo sapiens
  misc_feature (1)...(324): n = A,T,C or G
attttatcatgtgggcatcctgctgcaactggttctgcttggatggacagcctgnggaggcaccaccaccacagggagccaggacacaagcctattccaaccctgggtacagctccttcccttcccccgcaggctcggaacctagctgcaaggcctgcggggtccatttcgcaagcacaacccggaagcagacctgcttggactgnaagaaaaacttctgcatgacttgntcgagccaagaggggaatgggccacgcctctgccttctctgcctacggttccgagccacggccttccagcgggaggagctcatgaagatgaagg

SEQ ID NO: 1089 - DNA, 352 bp, Homo sapiens
  misc_feature (1)...(352): n = A,T,C or G
cctacaaggagaagatgaaggagttatctgngctgncgctcatttgctcctgcttntactntcancctcacccgacaccatntacnagcatggcaanntgganntaaccangctgaacntgntcaaaaggtgggnactacccaccttttgagcaagttcagcctggttaagtccaagctgaattggcctcgctggccatttaaatggcgcgccctcgaggaattcggatncggcgcgccatttaaatggccgctattggccaatttttttgctttttaccctggaangaaatacttcnataagcncctntgntatttanccccaatcttcacaagaaaaactgtaatctgtc

SEQ ID NO: 1090 - DNA, 288 bp, Homo sapiens
aatccagcaactatcacgagaatactccttagccacttcaattgggataaagagaagctaatggaaaggtactttgatggaaacctggagaagctctttgctgagtgtcatgtaattaatccaagtaaaaagtctcgaactcgccagatgaatacaaggtcatcggcacaggatatgccgtgtcagatctgctacttgaactaccctaactcgtattttactggccttgaatgtggacataagttttgtatgcagtgctggagtgaatatttaactacaaaaaaaaaa

SEQ ID NO: 1091 - DNA, 108 bp, Homo sapiens
  misc_feature (1)...(108): n = A,T,C or G
ccggctggacccccattatccngggggggggggatcgaaacttgggcaanggaggctccaccccctcccantgatcttctgctccncatnccggaactctacccgctc

SEQ ID NO: 1092 - DNA, 457 bp, Homo sapiens
  misc_feature (1)...(457): n = A,T,C or G
gtgacggtgttcgagtgaccatgncatagcgccttgactgcccgacaccnngtaggggtgcaggactttgtcctgctggagaatttnccagnagaggctgccttcattgagaacctccgccggcggttnngggagaacctcatttatacctacatcggtcctgncctactntnngnncaatccctaccgagacctacagatctacngcccggcatcttatttnaacgggnnncgtgntagnnagtannntangacngtnccancctcatttngttngcacnggcttgacactgtataccgggcacttcgtactgagcagtcgagnacccggcagtgatgattntctgggnngagagcgggggcaaggcaagacagaggcacacaagaagggagggnaagactttgcctnagtanganagacttgaagcaaatcctaaagtgaagccccgcccctcag

SEQ ID NO: 1093 - DNA, 478 bp, Homo sapiens
  misc_feature (1)...(478): n = A,T,C or G
gaactgaggaggctgtgcataggtgttctgcagaccatgaactgatcactagtccccagacattcatgagcacagtgtgaggctcctgacccacntccaagntctctnngnnctctntgactaagcnacctccngngnntacnnctanangccacgatncnaatcctgccntntngttactgnnnttgcnaatagagacctttcacatgtnagaggtgtaaccngacaanaaacggctncgancggagtgggnngatcgatatggaantgagatnctatttttntcaaanactatngcaanantgntcgactnagncggccccggactgggacaangtgcntgctcaagtacacccgagtacaacgagccacaacgagagccgcaccaaatgctgacatcatcgagaccctgagggaagaagggttttcaacgggctgtgacagcccagagccggatggggaggactcactggaatta

SEQ ID NO: 1094 - DNA, 389 bp, Homo sapiens
  misc_feature (1)...(389): n = A,T,C or G
ggagatgtctgcttgnccatgactggctgncttcgnggactgaggntcatacgtgccngnaaacaatcctaangctgccgtncctannaatcacatcccangctagactngaccntcanacctgtnaacccanacgggccanaaacaagcttaccagtnagtttggtctcaggancaggngtgtgagcccttggngctggggctattggattggcctacctacatcctcaacagtctccactctgcctgaatgatcctgagggtatcagaaagccctacactgttggtacctgggccccaacatactgtgaacggaaatgggccttctttcttttcctataggttatttgctggcagttctattaaacttgtttctaagagaaaaaaaa

SEQ ID NO: 1095 - DNA, 337 bp, Homo sapiens
  misc_feature (1)...(337): n = A,T,C or G
gaactgaggtcgtctgtatnacaacataaacttccagcgaaaatcagttgtgggatttgtggagctgactatatttcccacagttgccaacttgaatagaattaagttgaacagtaaacagtgtagaatataccgagtccggatcaatgacttggaggcccgcttttatttataatgatccaaccttagaagtttgtcacagtgaatcgaaacagtaagttgggcacgttaagaagctgctgtttgtacgtcatcctgtcactgttttcagagattgtttttcaacaaactttcccattcttattgtaataaagctatgtgttgtataaaaaaaaaa

SEQ ID NO: 1096 - DNA, 362 bp, Homo sapiens
  misc_feature (1)...(362): n = A,T,C or G
gaactgaggaccttggcaccatggttaccttgaaccgatatgcaacgtgacctcaaggatccagctactggctgcatcaagcanactgctnnntcctgctncaagatggaatgaancnactnttctgnttatgaanagaancctgnntgaggcnaacgaaccnttganncactgcaccgcctnncagncgctccanaccactcatntcannaagctcagcttttttntactccaggnttaangcagcattancacttcattnntattctgcttttggaaaagcagtgatnagatgaacatttgatcttcnctgtttatcatcanttntttactttggaggananagcttggaagataagcca

SEQ ID NO: 1097 - DNA, 434 bp, Homo sapiens
gaattgaggctgcttctgggacaacggccacctgtaccgggaggaccagccctcgcccgcgccgggtctccgctgcctcaactggttggccgcgcaaggcagccgcgagtcgctcaccgagcccagcccgggcaaccacaactactgccggaacccggaccaggacccgcgcgggccctggtgctacatcagcagcgagaccggcgtccctgaaaagcggccctgcgaggacgtgagttgcccagagaccacttcccaagcaccaccgccatcctctgccatggagctggaagagaagtctggtgcaccaggtgacaaacaggcacaggtgttccctcctgctaacgccctaccagccaggagtgaggcagccgaggtgcagccagtgatcgggatcagtcagcttgtgaggatgaactccaaggaaaaaaaaa

SEQ ID NO: 1098 - DNA, 515 bp, Homo sapiens
  misc_feature (1)...(515): n = A,T,C or G
gaactgaggtgcgatgcctctgcctctggcgttgtgaggccacttgcgagtatttgaaatgctggttaattccggactgagtggactcacctgtgacctggaaaggggcctgaatgagccgntgctgaacgcccctgagcagctcttncatctccttctggatgttgcagacgacctcctccatcaaccctacatcagctatccccttccagaacatcaaagtgtcctctggcacaaaccggatgagacagaaggggagcagacacattacccagaaacctcagcacatggctacaacgttcatttccattccaaaggattctgtgttaaaacatgaaagactggctgcttccacaagttggacggttgctgggggtgagaggagatgatcccagttacatcagtgctcatgtttatgaggaaaaccagcagaggtaacaaaggggtctataaccctgagctgtacgggaaagtacctgaaatctcttcagactctttctttataccctcctctg

SEQ ID NO: 1099 - DNA, 142 bp, Homo sapiens
  misc_feature (1)...(142): n = A,T,C or G
gaactgagagttctgatggtcagtccacagnaagacggccttgcgtctgtgggtgttggagactccattctaaagatataaaaagtgaaagaggngaaggccacctntctacctcaatacgantcattatttgttctaatga

SEQ ID NO: 1100 - DNA, 475 bp, Homo sapiens
  misc_feature (1)...(475): n = A,T,C or G
gactgagacctcctcaaagaaggcatgctgaccaaacagaacaactcgttccagcgatccaagaggaggtactttaagcttcgagggcgaacactttactatgctaaaactgcaaagtcgattatatttgatgaggtagacctgactgatgccagcgtagcagaatccagcaccaaaaatgtcaacaacagttttacnggtcatcactccatgtaggaagctcatcttgngtgccgacaacaggaaagaaatggaagattggattgcagcactcaagactgtccagaacaaagagcattttgaggttaaaaganangcatatntgtctatgggagcctgctgangnctctcctgccttcattctgatccacccccaccaactccacccttcacccccagagtattcttccccaggggaccccagnatntgtcctngtaaaatngagnncccatggcttctttcttttgataggac

SEQ ID NO: 1101 - DNA, 130 bp, Homo sapiens
gaactgaggttcgtcttggcaccagaacaaggcactgcaacatcaggcctttgccctaaacagctcacgatgccaggaactggccaattactactttggcttcagtggatggtcgaaaaggatcatcaag

SEQ ID NO: 1102 - DNA, 365 bp, Homo sapiens
  misc_feature (1)...(365): n = A,T,C or G
gaactgaggtgcaggngtccggggcaggcccgggacaagtcctacttactgccaccacagnccaccaagcagttcctcatctcccctcccgcctcaccccccgtggggtggaagcagagtgaagatgcaatgccagtgatcaactatgacctgctctgcgctgtctccaagctgggcccagnatngnggagatgaaggcacacaatttatnatttgatncnaatgtcangtgtactgnggnntgagancatngcttnnantgaaagaggagcgacaganngcaagaatgtgacccgnaggacactngngattacctntaacaaacgttgatgtttgaaactaataaagaattggtgctttttaag

SEQ ID NO: 1103 - DNA, 415 bp, Homo sapiens
gaactgaggtaaatttgctatgctagattacactccttcaaatgtcccgctggtgaatactggtctaaagacgtctgttgcaagaactgttctgcaggtacatttgtcaaggcgccctgcgaaatcccccatactcaaggacaatgtgagaagtgtcacccaggaacattcacagagaaagataattacctggatgcttgtatactttgctccacctgtgataaagatcaggaaatggtggccgactgctcagccaccagtgaccggaaatgccagtgccgaacaggtctttactactatgacccaaaatttccagaatcgtgccgcccatgtaccaagtgtccccaaggaatccctgtcctccaggaatgcaactccacagctaacactgtgtgcagttcatctgtttcaaaaa

SEQ ID NO: 1104 - DNA, 524 bp, Homo sapiens
gaactgaggatctcatctggcggtcgggtactggaagaagcgagggggagagcgcaccgttgcagagagacggcaagagaaaagggagactgagagtcgcgccacgccggcgccccaagacccaggaggagcccgcagcagttaggttgtgctgggaattctcccctcccttttgctccacaatgccttggtgagcggtcacggcgaccgagctactggtggaagaattggggctgagatgtcgcggcgggtggccgcagatggggatgctggagaaggaaggagttcacctcaagttcgcaatctgtgtcggaaagctggtccggcctgggagggcgtttcgagcaccggccgcttccggatctggtggactgatcggctttaaacacttcccctagatacccctccccattccctgttgcgttccctctgtcctgcgccaacccgcttgctaaaacagctgagtggccaagctgacaataaaatctcatgcctttgcggtgaggggcaggggtcatgactca

SEQ ID NO: 1105 - DNA, 439 bp, Homo sapiens
  misc_feature (1)...(439): n = A,T,C or G
ggctcagtggataaaggcacttgctgccaagtttattgatganaangangangnngnnaccnacgtananacagcnnccagactcacttntgcnnncttantgacctgtacgtgcatgctgggacncactgtacacnctcacacnaatggacnngacccaagatgncacacncanggnggggganannaatacacngattcacngagncataataggtgtcttgcgtactnnntgnncacancatggnaggaangacagccatgctcctggcactgcagaggccagatgttgtggaacgattggttgttgtanacataagcccggtaggaaccacacctggatcacacattggagccttcatagcagccatgaaggctgttgagatcccagagaaggtgccgcactcccaagcccgaaaactggcggataagcagctta

SEQ ID NO: 1106 - DNA, 253 bp, Homo sapiens
  misc_feature (1)...(253): n = A,T,C or G
aggcacaagggatggaccaccaccngctcagccgaccacgggagagagtgctgctctcctatctctccccatagagaaaacaacaggtntnttcaagccagtgncaccgagctccactgantgtacaggcagcagctacagccaaaagcaggccactcacgggaagtcccttacagaacctgntcaggtcacccaggctaagatactaaatatctttcaaattacacatattcttgaggtaaaaaataaacaa

SEQ ID NO: 1107 - DNA, 136 bp, Homo sapiens
agaggagagccagcacgcaccatggcaccggccggacacatcctcaccttgctgctctggggtcacctgctggaactctggaccccaggtcactccgcgaacccctcctaccccaggctacgcctgtcacataaag

SEQ ID NO: 1108 - DNA, 512 bp, Homo sapiens
  misc_feature (1)...(512): n = A,T,C or G
cggacagaactggactttcacgtttgacttctcttttttgagccaagaagaggatctggnatgggcnggagctncggntgcagctgccgggccccatggacatacccactgagggcccactcaccattgacattttccaccaggccaagggggatccagagcagggaccccgctgactgcctggagcgcatttggatggagacgttcaccgtcattncttctcaggtcacgtttgcctcaggcagcacagtcctggaggtgaccaagccactctccaagtggctaaaggaccccagggcactggaaaagcaggtgtccagtcgagcagaaaagttgttggcatcagccctacaccccacctgtacctgtcgccagcaccaatgtgctcatgctctactccaaccggcctcaggagcagaggcagctagggggcgccactttgctttgggaagctgagagctcctggcggccccaggagggacagctgtctgtagagaggggcggatggggca

SEQ ID NO: 1109 - DNA, 487 bp, Homo sapiens
gaactgagttcctgaagaattcatgtacaaccctttaaccagagtttatggagaacctcacaaaagacctgaagtccagaatgctactattgagtttatggctccttcagaatacatgttacgaccaccacaacctccagtgtacctctttgtatttgatgtatctcacaacgcaatagaaactggatacttgaattcagtttgccagagtttgttagacaatctggatctgcttcctggcaacactaggacaaaaatcggtttcataacatttgatagcactatccatttctacagtcttcaggaaggtctctcccagcctcagatgctaatagtttcagatattgacggtatgtgttatactcaaactcactcaacttcctggagaattgtccctttcagaaatgtttcctgaggtctttgatgtgtcaggaatgtgtgacatgactctagtataataaagagaaatcatttggaaaaaaaaaaa

SEQ ID NO: 1110 - DNA, 359 bp, Homo sapiens
  misc_feature (1)...(359): n = A,T,C or G
gtgagccaccactctnagntcctgccgccctcattgngaccttgggtcctcagcncatgctcgcacttgtgactacagacttcccagctctagaactacntgctaagnctgagngcccgcagacagatctnaagagggcatcagatcacttggaactggtagttnaagacagctgtgagtcnccatggagatgcngggaatggnaactaggccttctgtgagagcngcagnntggcatagccgcctctccaccncagagttttaaacatanataccctaccgattcncaactgcncctgtcgtgcaagtgtgcagtcccttagntcgctgtttctacttcccttttaaagaaaaaataa

SEQ ID NO: 1111 - DNA, 130 bp, Homo sapiens
tctcaaagtcataatcctcacactccaacttgtattaacccaggctcccatttgctgaagtaaaagtactgagttttccacttaccagtacttttgagtactgtagcaagtggctgggtcccattaaaaa

SEQ ID NO: 1112 - DNA, 349 bp, Homo sapiens
gaactgagaaaaatattttgacaaaagaagagactacttaaaattcaaggaaaaatttgaagcaggaggattccagtcttcacagtcgacctgaaaattcctaggctctttctggactttcacacaagtggaatttactcctctggacttgcagaaatgattccaggacaaaagcagcttgagtcacagtgtgtatcagcacttgttctctgtaaacaagagttactaaattgttggaatagcaaaagatctcatcatccaaactatgaaggactgccttaattaaagtgagggatctattctaagaaaaagcataaaatcattatataaaaagtttattataaaaata

SEQ ID NO: 1113 - DNA, 215 bp, Homo sapiens
gactgagagaagctgatggtccagggcatctaaccaaagtggtagaagaatcaaagctttcaaaagaaaatcaggcaaaagcaaaggaatccgacttatcagacactctgagtccaagcaaggaaaaaagcagcgacgacactacagacgcccagatggatgagcaagacctaaatgaaccccttgctaaggtgtctctattaaaaggtatttta

SEQ ID NO: 1114 - DNA, 454 bp, Homo sapiens
  misc_feature (1)...(454): n = A,T,C or G
actgagttttgtggctaagcccagactgcttgagtgaaacagccttcagggacgttccattctttcgtttatcccagtgcttacaacccaaaaacaaaattggattgccacaagtcggccactggctgaggaagtgcactcggnccctgacacaaatgcatcagtcaggagaaagagccagcttctcaggtgtcttcagagaaggccagactgacagctgcggtcacccattgcagtgctagcagcnatttcatggactggaagtgcttgttggtacttgatccagaaaactgtttctcaatctcttaagaggtganggcnggatcntganctntaanaaccataaaggcttccgtgcatatangtgacccacaagagctggataaactgcacctgagcagaagtgcaggactcccttggnggctctgntttanataagaaagtgtattttttg

SEQ ID NO: 1115 - DNA, 241 bp, Homo sapiens
  misc_feature (1)...(241): n = A,T,C or G
aacattgccatcgtgaagccaggcaaaaagggacagccagccgttatcatggcagtggatcctcgataccggggcagagtgagcatctctgagtccagctactccctgcatattagcaatctgacctgggaagactcagggctttacaacgcccaagtcaacttgaagacatctgagtcccacatcacgaagtcttaccatctccgtgtctaccggaggctgtnaaagccccacatcactg

SEQ ID NO: 1116 - DNA, 466 bp, Homo sapiens
  misc_feature (1)...(466): n = A,T,C or G
gaactgaggttttgtgtggacagtaatgaccgcacgtttccgattgcctgctggcagaacctacaatgtccgagcatcagagttggcccgagacagacagcatacagaggtcgtttgcaacattcttcttctggataacactgtacaggctttcagagttaacaaacatgatcaggggcaagttctgttggatatagtcttcaagcatcttgatttgactgagcgagactattttggtttacagttggctgacgattccacagataacccaaggtggctggatccaaacaaaccaataaggaagcagctaaagagaggatcaccttacaatttgaactttagagtcaaattctttgtaagtgaccccaacaagttacaagaagagtatacaaggttggtttatggaactatttctttngaaaacattatcggagatctaatatgaaaaataaaattaactaggcca

SEQ ID NO: 1117 - DNA, 504 bp, Homo sapiens
  misc_feature (1)...(504): n = A,T,C or G
gactgaggcattgccttttggcactcggggagnaagatgcagcaggttccgtctcagaagtaatggctggatccctgaaagccaacgggctcggtgtggtccacccgtcagaaggcataggtagatggtgggcatctgcctcagacatagttctcaagttcagccagaagaatgcagcgttgagccctctgcagcccgtgtcgacggaggtgttgtctccaggaagcatcatggaaaggcgtggtggtgcacaagggccttcaggatgcctgcgcctggtgacggntgcgcctcaggttctgggcctgactcggaagggtgcctgtgagcagaagagctggcacgcgcagctcagtggaccatcagtgccaacccgtcctgtaccctggctgaggggtgtgctaannggcanattcctggttggctcctngtaaggcgnggcacaaaatcaccatcgaaagaaagggccttcggnatgccttctgtctggatattgccctgtag

SEQ ID NO: 1118 - DNA, 532 bp, Homo sapiens
gaactgagaaagtgagtgagaaggtgggaggagcggaaggcaccaagctcgatgatgacttcaaagagatggagaggaaagtggatgtcaccagcagggctgtgatggagataatgacaaaaacgattgaatacctccaacccaatccagcttccagggctaagctcagtatgatcaacaccatgtcgaaaatccgcggccaagagaaggggccaggctaccctcaggcggaagcactgctggcagaggccatgctcaagttcaacctcttggagatggatatagaacaggtgagccagctctccgcacttgttcaggctcagctggagtaccacaagcaggcagtgcagatcctgcagcaggtcactgtcagactggaagaaagaataagacaagcttcatctcagccaagaagggaatatcagcccaaaccacggatgagcctagagtttgccactggagacagtactcagcccaacgggggtctctcccacacaggcacacccaaaccttccaggtgtccaaatggatc

SEQ ID NO: 1119 - DNA, 367 bp, Homo sapiens
  misc_feature (1)...(367): n = A,T,C or G
gaactgagtagcgctggggacctgtgaccgcngcatccagctaaccatgggacagnttggctctgntcaccagccccttaggagaggactccatcaaggncccactgcnnattccncatcatgnaggccganaggatccttccagccaggggagctgncctttgaaaaccnaggncgngtactgctggtnntccntgccanccaccttcangagaggctcctgttnctgctggcccacggatggggaggngggccctggacgnagnctttgtgtggaaggnagctctgaccctgggnctgaccttctatactactgcttctncataggcancacgttctacnacaaatggntgacaaagagcttcta

SEQ ID NO: 1120 - DNA, 389 bp, Homo sapiens
  misc_feature (1)...(389): n = A,T,C or G
taagcagtacgctaatggacatagacagcacaatttccagtggacgctcaaccccggccatgatgaatggacaggggagcacgactgcttcaagcaaacacattgcctataactgttgctgggaccagtgccaggcatgcttcaactccagcccagacctggcagaccacattcgctccatacatgtcgatggtcagcgtggaggggtgttcgtttgcttgtggaaaggttgcaaggtgtataacaccccgtcaaccagtcagagttgnctacagcggcacatgctgacacacagtggagacaagcctttcaagtgtgnagttgntggntgcaatgccagctttgcttctcagggagggctagntcnccatgtacccacacacttcagt

SEQ ID NO: 1121 - DNA, 797 bp, Homo sapiens
  misc_feature (1)...(797): n = A,T,C or G
aagtaaaactgagggncaagtcctccataccaaggaccaggctaaaaccagattacactgcccctccctgggccctattgacttaaagcagccactgtaatcatgggcaatatctttgggaaccttctgaagagcctaatcggcaagaaggagatgcgcatcctgatggtgggcctggatgctgccgggaagaccaccatcctctacaagctgaaactcggggagattgtcaccaccatcccgaccattgggtttaatgtggagacagtggaatataagaatatcagcttcacagtctgggacgtaggtggccaggacaagattcggcccctctggagacactacttccagaacacccaaggcttgatatttgtggttgacagcaatgatcgggagcgagtgaacgaggcccgggaagagctgatgaggatgctggcggaggatgagctccgggatgctgtgctccttgtgtttgcaaacaaacaggatttgccgaatgctatgaatgctgctgagatcacagacaagctggggctgcactccctgcgtcaccgcaattggtacattcaggccacctgtgctaccagcggggacgggctgtatgaaggcttggactggctggccaatcagctcaaaaacaagaagtgagagccaggcagccctctctgactaccccacccactcctgacacacacctgctgnctccttaccccaattttcccttcttcctntttgaaagtggccaaggtcctgggtatcatgtccacatgcccagcaagcgccttgcctttctcctc

SEQ ID NO: 1122 - DNA, 452 bp, Homo sapiens
  misc_feature (1)...(452): n = A,T,C or G
attgttatctaaagaagctatccctaacagattttactaccaacacagcagtcgaattcagcccattattttggttgctgaggaaggctggacaatcaccctgaacaagtcatcatttaaattaggtgaccatggctatgataattccctgcctagtatgcacccgtttcttgctgcccacggacctgcctttagaaaaggttacaggcagagcaccatcaacactgtggatatttatccaatgatgtgccacatcctgggactaaaaccacatcctaataatggaaccctcagtcataccaagtgcttgttggtggaccagtggtgcattaatctcccanaagccattggaattgttgttanngcactattgntattaaccatgctaacaggcctgatgatattnattgnggagcagancatnccacatcccgnccattctcccgtcttca

SEQ ID NO: 1123 - DNA, 247 bp, Homo sapiens
agtgggcatatgaacagtgtgcaactgggagaaacttgtctccccggccattaggactagtccttgaaggggttccttcaaacttgagccatttacaggtaccacgcggagcctgagaaaagaaaaaccataaagaccgccacactcaagatggcgttggactcggcaagcgtggcagtgacgtggcgactcggctcacgccgaacaacttcaaaatactatattactccatttttaaaaaaaaaaa

SEQ ID NO: 1124 - DNA, 108 bp, Homo sapiens
gactgaggctcagacaagagaaaagctctagaagagaccaaagcatatacaactcaatctctagctagtgttgcttatcaaataaatgcattggccaacaaaaaaaaa

SEQ ID NO: 1125 - DNA, 468 bp, Homo sapiens
tgagcaccatgaaggtgaaggagacaaactcaaagccaaagttggcaagccgtggcacgttccagaggaagggcatcaagattgtggggaaatggaagcaagtgacgatcgacccgaatctgtttgcagatggacagatggatgacctggtgtgctttgaagagctgacagattaccgtttagtcaagaatccctcccgtttgttctcaagtgaggagacaaagaagagaaaggcccaggctgtttcagaagaggaagaagaggaggaaggacagtccagctccccaaagaaaaagatcaagttgaagaagcagagagatgcggcacgagctgccgaaggcgctgctgcccagaatgagtatgaagtcaaagcgtccgagccagaggctcagggagaagtcactgcttgttctgatcaaaaggtcggaggagccaaatcagaaagcctggcccaggctgctccaagaa

SEQ ID NO: 1126 - DNA, 153 bp, Homo sapiens
  misc_feature (1)...(153): n = A,T,C or G
ctcttatgaactcctagaaggcagngacatctactttccagagattgtgaagcctccccggaatccagagctagttgcccggctagagaagattaagatacagctagccaatgaggagtataagcaggatcactcgcaatgtcacttgtcagg

SEQ ID NO: 1127 - DNA, 495 bp, Homo sapiens
  misc_feature (1)...(495): n = A,T,C or G
tgaggacttgctgaaaatgaatattgatatgaacaagcatcttgtgactggttctgttcaagccaaggtactgaaatggggtgaagacntagaagacttgatgtcaccagactacatattgatggcagactgtatatactatgaggagtccttggaaccactgctgaaaacattaaaagatctcagtggatctgaaacttgtattatatgttgttacgaacaacgtacaatggggaaaaatccagaaattgagaagaagtattttgagctcctgcagctagactttgactttgaagaaatccctttggacaaacatgatgaagaataccgaagtgaagacattcatattgtgtacatcagaaagaaaaagccaaaaccgccatcatgaagcgcttctccatcttagccacgccccgcaacatccctgggtaaggtcaagatgtgaacggagcatgtgcatacccgcatggaaaactgcctcacagatttctccag

SEQ ID NO: 1128 - DNA, 420 bp, Homo sapiens
  misc_feature (1)...(420): n = A,T,C or G
agactgagacagctagcagcggtgcctgagttccagggcactagggcctctcttcaagtcctctcctgagccagtggccctcacagagtccgagaccgagtatgtcatccgttgcaccaaacacaccttntctgatcacttggtgttccagnttgactgcacaaacaccctcaatgaccagactntggagaatgtcacagtgcaaanggagcccactgaggcatacgaagtgctctcgtangggcctgcgcggagcttgccctacaaccagnctgggacctgctacacactantggctctgcccactgaagaccccacagntgtggcatgcacgttcagctgtgtgatgaaagttcactgttaagggactggngatcccaacaanaggagaantcgangaaagaaggctatgaggatgag

SEQ ID NO: 1129 - DNA, 286 bp, Homo sapiens
gaactgagacccattgtgccgaaaatcttctcaaggcggacacttaccggaagtggcgggcagccaaggcaggagagaagaccatctctgtggtcctacagggctggagagatggctcagcggttaagagcactggctgctcttccagaggtcctgagttcaattcccagcaaccacatggtggctcacaaccatctgtaatggaatccgatgtcctcttctcgtgtgtctgaagacagctacagtgtactaatatacataaaataaatgaataaattaaaaaaaa

SEQ ID NO: 1130 - DNA, 131 bp, Homo sapiens
  misc_feature (1)...(131): n = A,T,C or G
gagatctgacccttgcanaccggcctggnggagggaaatgnatacnnntganaanggnantcacttcttttctgctggccctctaagacatttntgcttcatatttataaacnaaataaacttaaagccgg

SEQ ID NO: 1131 - DNA, 408 bp, Homo sapiens
  misc_feature (1)...(408): n = A,T,C or G
atataccctagcagacatcctgatgttcgagagtcactaggtcccctgttggcccctacccctctccgtccatggccccagatgacacttcagggcttctctgtgtatcgatggntgtcctanaacttgctctgtagaccaggctggccccaaaatcagagctttgacctgcctctggctcccaagngcagggattaaaggcgtggggcacctctgtcaggctgatacactgtatctcatggatatgtctcttaactttttaatagtccctcagtttcttcattccactttaattactaatccctgtttgtcaagtacagtttgacagagtctgagtttgcttgattagattcaggttaaaatccgnttcttactctattaaacaaagnttaaattacaaaaaaaaaa

SEQ ID NO: 1132 - DNA, 191 bp, Homo sapiens
gaactgagggttccaagactgccctttggtattcaaacgggagccgctttggactgactggctgccttcctcctcctccccctcctcccccttctgcttcagatttatttattatatgtaagtacactgtagcagttgtaggacacactagacgagggcaccagatctcattgtgggtggttgaaagacac

SEQ ID NO: 1133 - DNA, 471 bp, Homo sapiens
  misc_feature (1)...(471): n = A,T,C or G
aatacacaaactcgagctacttctaaactacctgttaaatccaaagaagcggatttgcttagacatcttcatccaggagggccagagcctgatgttacaaaagtcaccaaatcgagacgagagaatgggcaggtgaaagcggcagagactgccagcaggaggaacctcagaaacagctacaaaccgtttaataagcaaaaaccggaggaggaactaaaggataaaaatgagctgctggaggctgtcaacaagcagttacaccagaagctgacagagactcagggagagctgaaggacctgacacagaaagtggagctactgggagaagtttcaggataactgcttagcacttttggagagcaaaggtctcaacccaggccaagagaccctggcatcaaagcaggaacccaccacagatcacacggactccatgctgntgctcgaaactttgaaagacgaactgaaggtttt

SEQ ID NO: 1134 - DNA, 219 bp, Homo sapiens
  misc_feature (1)...(219): n = A,T,C or G
tgacatgtgagcttggggttatactgtgccataattaacattgccttgacnactntggacaccgagactggcctcataagtagaaggctttntttttttttttttaanacagactcnccatnttnntgnatatgcgaaagnantttggtccnncaccccctctntgggacanaaactntntgtgtanccttgggtgnanaccaccgtaggccttgaact

SEQ ID NO: 1135 - DNA, 423 bp, Homo sapiens
gaactgaggtgactcctgctcaggtcatgccgttatctgctgatccagccggccctgccaggtgaccatgtctgtcctcggcccagttcttctccaggtgttctgggccgggtgtgtcgtcaccctgcggtcccctctgccagctgctttcactgccaatggcacacatctacaacacttggcaagggaccccaccacaggtaccctctatgtaggggccaccaacttcctgttccagttgagccctgggctgcagctggaagccgtggtgtccacgggccctgtgaatgacagccgggattgcctgccacctgtgatacctgatgaatgtccccaagcccagcctactaacaaccctaaccagctgctcctggtgagcccagaggctctggtggtgtgtgggagcatacaccagggcatctg

SEQ ID NO: 1136 - DNA, 554 bp, Homo sapiens
gaactgagatgatgactttgaccagtttgacaagcctggtgcagaacggtcctggagaagaagagctgctgacgaggactgggacagtgaactggaagatgacttgcttggagaagatttactgtctggcaaaaagaaccagtcggatttgtcagatgaagagctgaatgatgatctgttacagagtgataacgaagaggaagaaaatttcagttctcagggtgtcaccatcagtctgaataccacctctggcatagttacatcatttgagctgtctgacaacaccaatgaccaatccggagaacaggaatctgagtatgaacaaggagatgatgagctagcctaccacaaacctgaggaacaagaactgtatactcaagagtacccagaggaaggacagtatgaaggccatgatgcagagttgacagaagaccaaatagaatatggggatgagccagaggaggagcagctgtacagtgatgaagtgctggacatcgaaatcaatgaacctttagatgaatttacaggaggaatggaaagaggaatgggaaacc

SEQ ID NO: 1137 - DNA, 104 bp, Homo sapiens
  misc_feature (1)...(104): n = A,T,C or G
gactgaggcatactccagcacccagntggtacagttctgaaacagctacagccaccgccanggngcccaagagagctggaattttataccatggtttactgctg

SEQ ID NO: 1138 - DNA, 456 bp, Homo sapiens
  misc_feature (1)...(456): n = A,T,C or G
gaactgaggcattttgtgaaagaaggaagatcctgtctgctgcatggataatggactggaacacagaaagaccatgcagggttcggctgtagaaggccggtatctccataggccagannacaccatcangatctcctgggactggagttatanaggttgtgagctgccatgttgaaccaanctggttactgagggacacaggcatgtggatggaaaccctgctgggagaaaaacantanctggtntgtcnctttatagcccncttnatgatgcaagananaatcggctncncacaactngnctctgacctntncatgcttgctgtaccttgtgctcaccctacccacacaccntcgnnatcatnatcaacataacgtttttaaatatannaagtntattcaaatatatgtgtataaatacatntatanataaatatgtgaatacattaaaaaaaaa

SEQ ID NO: 1139 - DNA, 163 bp, Homo sapiens
  misc_feature (1)...(163): n = A,T,C or G
cacactttcgcgctcagcgtcgacggaggctctgtggctctctacgtaaaactgntgaaagaattccagagggtgccatttgctcgggcctagcagggactggagctagagcgtggcgctggnctctttgnggggtcaggctggaacagggagaccctgactg

SEQ ID NO: 1140 - DNA, 400 bp, Homo sapiens
  misc_feature (1)...(400): n = A,T,C or G
gactgaggacttaagatgccttctttgntcatacaccgtttaggacatggaagattttcaggtccggtgaagacantgcnacccnagtgagcattncanatcatgtntaaagagaggtaagagatatgctgcanagtccaaagaacaagatgggtgtggctcagatggctttacatatttcaaganccaagaccccctgtctgctacaactctgctgtgcangccctgagcacanctgcagctttctctgacacaccatcccacagggactttctcacctatacagtgttctcatgtcaaataagatcgttgtacaaggtctttgttacattgaaccctgaatttattcagttatgttaagngcaataaaatacctgggttttgtacttgcagaaaaaaa

SEQ ID NO: 1141 - DNA, 181 bp, Homo sapiens
  misc_feature (1)...(181): n = A,T,C or G
gactgagggtttctctgngtagccctggctgtcctggactcactctgtncaccaggacccnnacccaagagatctgcttgcttttgcacctcangactaaatctaangaaagatggatacctacaatggtgaatttgnggactctgtttgagcagcttgtgcagccggatggagattatca

SEQ ID NO: 1142 - DNA, 172 bp, Homo sapiens
  misc_feature (1)...(172): n = A,T,C or G
gatatccctgagatggacacagtccacctgngtggcctaaggatgcagggcagaggaactgcccatgggcagtggttcatcggccaagctgagagtgtgtattttggatttccggtttgcggagatgctctcttccgggtgttctgcccaaaataaaggacctggacaagaa

SEQ ID NO: 1143 - DNA, 318 bp, Homo sapiens
gaactgaggtacaccaaattgaagaccgccccaacatctacatcttcaatctggctttggctgatgcgctggccaccagcacgctgcccttccagagcgccaagtacttgatggaaacgtggccgtttggcgagctgctgtgcaaggctgtgctctccattgactactacaacatgttcactagcatcttcaccctcaccatgatgagcgtggaccgctacattgctgtctgccatcctgtcaaagccctggacttccggacaccagccaaggccaagctgatcaatatatgcatctgggtcttggcaaaaaaaaaaa

SEQ ID NO: 1144 - DNA, 453 bp, Homo sapiens
  misc_feature (1)...(453): n = A,T,C or G
gaaagcagttatgatgccgncaaagccctgcancgcctggtgaagaagcctgtgcccaagctgatcgagaagtgctggacagaggatgaagtgaaacgcttcgttaaggggctccgacaatactggcaagaacttcttcagaatcagaaaggagctgcttcccagtaaggaaaccggggaactgattaccttctattactactggaagaaaacaccagaggnnttcagctnccgtgcccaccgncgccaccgcaggcaggcagtgttcacgaagaattaagactcgcacagcgtccacccctgtnaacacgccctncagaccaccttccagtgaattcttggacctgagttcaaatcccagcaaccacatggtggctnacaaccatcctgtaanagagatctgactccctcttnctggagtgtctgaagacagctacaagcgtacttacatat

SEQ ID NO: 1145 - DNA, 571 bp, Homo sapiens
ggtttcactatgtagaccctggtcggcctggaactctatagaccagactggcctcgagctcagatccgtccccctctgctgtcccagcacggggattaagaacgcgccaccactacagctgaccggagcttcactttggttagacacaaacacaacacagcttgtcgtcaaacaccgtgacatgaatgagaaggaattagaagcccaggaggcacgaaaggcccagttggaaaaccacgaaccagaggaagaggaggaggaagagatggaggctgaagagaaagaagctgggggctcagatgaggaacaggagaagggtagcagcagcgagaaagaaggcagcgaggatgaacactctggaagtgagagtgaccgagaagagggtgacagagatgaggcaagtgacaagagtggcagcggtgaggatgaaagcagcgaggatgaagcacgtgctgcccgggacaaagaggagatttttggtagtgatgctgattcaaaagatgatgctgactcttgatgatgaggacagagggcaggcccacaggggcagtgacaatgactcggacagcgg

SEQ ID NO: 1146 - DNA, 145 bp, Homo sapiens
  misc_feature (1)...(145): n = A,T,C or G
cagcgccggtggctggcgacttcacggctgnngacgtcatgacgagcgaggngattgangatgacananagttttattnganggccatgacctactgtaagcagatcccacccacggtggacggcatgctcggggggaatgtcca

SEQ ID NO: 1147 - DNA, 302 bp, Homo sapiens
  misc_feature (1)...(302): n = A,T,C or G
cagcacgtcttaaaacatttactgctaaccagattgatgaantaaaagacccttcaggactcttttatatccttccttttcaaaagggatacttggngaatngggatgnccagcgacangnttgggattatctttttggaaaagaaatgtatcaggnngagtctttanatactaatattantatnacagaaccatattttaactncactncnatccaagantcantgaangaantcctattcgaagaanancaggtccaagcaggattaagagtaaatgccggggctctcagcgcacacagg

SEQ ID NO: 1148 - DNA, 182 bp, Homo sapiens
  misc_feature (1)...(182): n = A,T,C or G
tcattgaacacatccaggtgaacaaggcacctaagatgcnccgacgaacctacngagctcatggncggattaacccatacatgagctccccctgccacattngagatgatcctcantgagaaggaacagattcgttccaaanccacnaataggaggttngcacagaacaaaaagatatccca

SEQ ID NO: 1149 - DNA, 453 bp, Homo sapiens
gaactgaggcctctaattttaagaagacaaccatggcatccagtgcccagagaaaaaggatgagtcctaagcctgaacttactgaagaccagaaacaggaaatccgggaagcttttgatctctttgatgctgatggaactggaactatagacatcaaagaactgaaggtggcaatgagggccctgggctttgagcccaagaaagaagaaattaagaaaatgataagtgaaattgataaagaaggaacaggaaaaatgaacttcagtgactttttgacagtgatgactcagaaaatgtctgagaaagacactaaagaagaaatcctgaaagctttcaagttgttcgatgatgatgagactgggaaaatatcattcaagaatcttaagcgcgtggccaaggagctgggtgagaacctgacagatgaggaactgcaggaaatgattgatgaagctg

SEQ ID NO: 1150 - DNA, 260 bp, Homo sapiens
gaactgaggattcccgaggaccggtgcagcagcctttggaggatcggctcttcccacctacggtctctgcagtctatagcacggtccctgtagtcctggctatcctggagcttgctgtataaaccactgtggccacaagctcccagagatgttcctgcctctccctcccatactggaactaaagctgttcatcatcacattcctttcaataagcgtttctttaataatataacttggaagccatatgaaataataaaaaa

SEQ ID NO: 1151 - DNA, 115 bp, Homo sapiens
gaagaagatggactcacatgagcacaagttcagaaatgaatagtttgaaagtaggttcttggaaaataaataaataaataaataaataaagacaatggaatggaaagaaaaaaaa

SEQ ID NO: 1152 - DNA, 400 bp, Homo sapiens
  misc_feature (1)...(400): n = A,T,C or G
actaactgatgatgatgttgaacagagcccaggcaatgccttatgtggatcggcagaaccgaatctgtgggnttctggatattgaagacaatgagaacagtggcaaattcctccggagatactttatcctggatacccannncaactgcctcctctggtacatggacaatccccagaacctggccgttggggcaggagctgtnggatctctgcagctgacctacntcncnaaggttntnatagntnccccaaagcagaaacctaaaacaccattntgcttcnntatcaatgccctgtctnagagatnttttnttcaagccantgaccanaaagatctganggactgggnncnaagacnttgnaccaagcccanccaagattacctgtacccaaagctgcg

SEQ ID NO: 1153 - DNA, 542 bp, Homo sapiens
gaactgaggcacgggcagtggttctgtatcccacgcaatcatccgcagcgttgcccccactggccacctacacacagtagagttccaccagcaacgggcaggacaaggcccgggaggaattccaggagcatcggctgagccagtgggtgactgtgcacacccaggatgtgtgctgcagtggcttcggtgtggtccacgtggctgacgctgtcttcttggatatcccatcaccctgggaagctgtgggccatgcctgggatgccctcaaggttgaaggtgggcgtttctgctccttctctccgtgcattgagcaggtgcagcggacatgccaggcgctggcagcccatggcttcacagagcttagcaccctggaggtactgccacaggtctacaatgtgcgcactgtcagtctgcccttgcccgacctgggggccaacaacttagagaccaacatgggctctgatgccagccccttccgtagtggcacacccatgaaggagactgtgggccacactggctacctgacttttgccactaaaacc

SEQ ID NO: 1154 - DNA, 300 bp, Homo sapiens
  misc_feature (1)...(300): n = A,T,C or G
aagaatcatggtgagcacaangaagaaataantgaagcggngccagggggtggttcctcatgagatgnaaggccaccanaggaaagcacccannaaatgatggaggaggaggaagaaataccgnnacctanttcagcggtggcaccaccaggtgctccnaagaaggaacatgtnaatgtngtgttcatcgtacatgttgatgcnggcaagtcaaccattgtaggacaaataatgtatttnactggnntggtngacaaaaggacacttgnnaagtatgatcganaagctaataaaaaaaaa

SEQ ID NO: 1155 - DNA, 359 bp, Homo sapiens
gaactgagatccctgctgtctgaatggaggaccacagtaggccacgggaggaggagaatcaagatgctgcagttgacagtcaggtgaccctctgaagctcatctgcctcttcaaccatcaggtctaggtggctgtgctgtagactctgttaccctgtgacgtgctggtgcggggagttccatagggaggacgctccatgtcctggaagccagaaatggggctggtgtcatttgaggatatagctgtggaattcacctggcaggaatggcaggacctgaatgaaggtcagagaactctctacagggatgtgatgctggagaactacagcaacttgctgttcttggggcacaaaaaaaaaa

SEQ ID NO: 1156 - DNA, 245 bp, Homo sapiens
  misc_feature (1)...(245): n = A,T,C or G
aatctcaggatgcacataagntgctttgnnngacaccntggaggaaganaacgagaaggatctggtagagactagctaaacgcnttaanagagaaaaagagantggtggcatcattaattntgnggaanaggangcgaacanaangaagcaganagnnttngggagcacactgaatggcaaggatggaactgggtcccatctagngacagngcctnctggacctagcttggctgatgctctcatc

SEQ ID NO: 1157 - DNA, 533 bp, Homo sapiens
  misc_feature (1)...(533): n = A,T,C or G
atggagctaatgcacccatccgaagaacaaagaagagcccaaagcccggcccttgagagtgggtgacacagaaaagccagagcctgaacggtcccctcccaaccgcaagcgtcctgctaatgaaaaggccacagatgactaccactatgagaagttcaagaagatgaacaggcgctactngaggcagcggtaggggctggataacgatgtgatgcacaggggtgcgtttgtgtgcatgtgcaagcgtgggggcacacacacatgtcctcttgcataaaacctgcttattagctcttgagttccccatcagatagtgcttctgctcagtggctggatttctgttctggttttggttggagactgtagctctctgtgtatcctaggccatgaactccctcctcctccctactactgggattttagaccccccaccccctgcattttcaagcactaactttgtaactattnggaagaaaacaatggtgtctatgtctatctatattgtttccctaccctagggcatgacactgata

SEQ ID NO: 1158 - DNA, 498 bp, Homo sapiens
  misc_feature (1)...(498): n = A,T,C or G
gactgagacagctcagtgtanaanagagangacggagaagganatggaganggagaanganaaggagnngangaagannaagaagacgatcancatgtttgatggcagacgtcttcttncnncganctccctgtccttaggaaaagagggaaacngatggaacanggntataggcctaagacnggntttctgtgtgtacccctgnctgtcttggaactcactctgtagacgaggctgnccttgnattcagaaatcnncctgcctctgcttcctgantgctgngattanaggcgtgcaccaccatgcccngctggaattcaacacttntatcttttgcttggtgacttattatagtttgctgagaaaaaaagttcaatttcttttgtttaaaaattgtgaatgcacatttgcatatttgagacagcatcttgctatgtatcccagtctacccttgctgttttgttaaaatacaagtaacaaacttgtcaaaaaaaaaaa

SEQ ID NO: 1159 - DNA, 427 bp, Homo sapiens
  misc_feature (1)...(427): n = A,T,C or G
aactgagagacggaagcagctacttgaggcgagccacagctcagatcatggaaatcagtatgcaagcccaggagaactgcaggagttggcatcatattcatgtannatcagtgntaactctgggctacngagacgaatgttggactactatgtgtctcactgacaagacactgnnggtcancgatgggagacagaactcaccatttaaaaagatnaagaangaacaccacccnactaagatatgaaaaaggaagcacganggnaangctgagagaaacagatgctacccacagggcagcggagccatttggttgttttggtctttgtaccancaactcccactcctgtgaacggngtccagttccagctgnactacacggtttttccttgcagtcaaaacgcgaacaatggaccccactcctccagc

SEQ ID NO: 1160 - DNA, 446 bp, Homo sapiens
  misc_feature (1)...(446): n = A,T,C or G
gaactgagactgaaggncttttaccagagtctctgctgttctcctcggattcttcctcctcctcatcgtcatcggagtacttcttctttggggnctttctccgcaaacgcctgctttgcctcattggccgagaaggatgccgcctcagtcttcggctgcagaagtcagtgtcgctgncctcattggatggtggctcttcttcactttcatctggattttcatcagacacaacaaactcatcctgagatctgtccaggaaaagccagatacatcacgatggtacacttagagtttggtntgntttggnacattnagaagngataaccagtttttcaaagntccaaacacattgtaaagaacccaggaaaacattaagtaaatntaaagatatatttggaaaattatgtcaactttgccaataaaatgtatgttctaccatctaaaaa

SEQ ID NO: 1161 - DNA, 219 bp, Homo sapiens
  misc_feature (1)...(219): n = A,T,C or G
cttcacatcatttggnctgnaccatangcntgnnngnntggtnntctncagngcctggacccattgaccagccccctgagggggaggatgagcacatggagtctctggacttagaggctgacaggatccggcaggagctgatactcactcatttcagttagaatgagggtagagggaggaggaaggctttccagaataaaccgacaatttcccccctta

SEQ ID NO: 1162 - DNA, 462 bp, Homo sapiens
  misc_feature (1)...(462): n = A,T,C or G
gaactgaggtctactgcgcgccgcgcgagcatacgccgccgtccagaaaccagtccaacccaagcaggacgatgaaccaccctcctctgcgttcatcaaagaatacaaggacatcatccccaacatagagaaggttgntgatnntgtgnntggaangttgnctttgganatggccgnccngactganntnnnanaggtcccgnagngaacaatncgatgaacnanatggtggntnaccctgangngtncngagcntngnnggcttattcnngagccttgaatgacaggntccgcgttnttgtatacctcatgcagatacatnnaaaggacaaagcccacaaacgccatctgntgatgagcatcgaccggaggaaaaagttgntcaaaatcctccgtcagaccaactatgatgtcttcgaaaagacatgcanggagctaggggtggnatataccttaccccct

SEQ ID NO: 1163 - DNA, 500 bp, Homo sapiens
  misc_feature (1)...(500): n = A,T,C or G
actgagacctataggatnagnnataatgggagcatttttagacaagccnaagcatgnagaancntaatgcccangggcaggngantgggttaccatacngcctacgcngcatgcaaggttgncgagttgaaatggaggacagcacacacggctgttgatctngtttgccaagtggacttgagacatggncattctttgctgtatatgatgggcatgctggttctcaggttgccaaatactgctgtgagcacttgttagatcacatcaccaataaccaggatttcagaggatctgcaggagcaccttctgtggagaacgtaaagaatggaatcagaacagggtttctggagattgatgaacacatgagagttatgtcagagaagaaacatggtgcagatagaagcgggtcaacagctgtgggcgtcttaatctctncccaacatacttatttnattaactgtggagactcgagaggtttacttttgtaggaataagaaaag

SEQ ID NO: 1164 - DNA, 524 bp, Homo sapiens
  misc_feature (1)...(524): n = A,T,C or G
tgagttgctctaggtcgtaaccagcctttgaaaaaggagaaaccaaaatggaaaagtgactatcccatgacagatggacaactgcgcagcaagagggatgaattctgggacactgcaccagcttttgaaggccggaaagagatctgggatgccttgaaggccgctgcacatgcttttgaaagcaatgatcatgaactggcacaggcaatcattgacggtgcaaacataacactaccacacggtgcactgacagagtgctacgatgagctggggaaccggtaccagctgccagtctattgcctggcaccaccaatcaacatgatagaggaaaagagtgacataaagactcttgatattcctgagccacctcccaattctggacacnaatctcagctccgcctgcggctctccacaggcaaagacctcaggctcgtggtccgcagcacagacacagtgtttcacatgaagaggcgcttacacgccacaaagggcgtggagccaggcagccagcgcttggttcttct

SEQ ID NO: 1165 - DNA, 407 bp, Homo sapiens
  misc_feature (1)...(407): n = A,T,C or G
aactgaggacttttcccgcaggctgcgaggggacccacagttcgtggccacttgcctcctggggagggcgactctcctcccatccactcaagatgctcaggggtccgggacccgggcggctgctagctgctggcagtcctgtgcctggggacctcggtgcgctgcaccgaagccgggaagagcaagaggcaggctcagcaaatcgtgcagcctcaatccccggtggctgtcagtcanagcaagcctggctgttttgacaatgggaagcactatcagataaatcagcagtgggaacggacctacctaggcaacgccctggtttgtacctgctatggaggaagccggggttttaactgcganagcaagccctgngcngtaagtggaaggcanntctggggccctgggca

SEQ ID NO: 1166 - DNA, 513 bp, Homo sapiens
  misc_feature (1)...(513): n = A,T,C or G
gattggcataagatatttcttcaagattggacagctgctggcctgctacttctgttagctgcaagagataacaccatcatggatctgcagacacagctgaaggaagtattaagagaaaacgatcttttgaggaaagatgtggaagtaaaggagagcaaattaagttcatcaatgaatagtatcaagaccttctggagcccagagttaaagaaagagcgggccttganaaaagatgaagcttccaaaatcaccatttggaaggagcagtaccgagttgtacaggaggaaaaccaggttagtttcatttatacatttatctttatgggctgagtccatgtatataaacaaaaagaggcattccttttccatcccgtcttagatttcccccatctttggtcttttattttttttatttatcctttttactttagaactctgtttctantatcttagcctttttaagacttgttcctgtacatggtgcaaaacactcacacatataaaattaaaaaa

SEQ ID NO: 1167 - DNA, 490 bp, Homo sapiens
  misc_feature (1)...(490): n = A,T,C or G
gaactgagggtctgcactgaacctgagctcaccagttcagctagactgcctggccagtgaactccaaagactgacctgtctctcccttcccgttgctggaattacagaaagtatttgctggcctcctgtcctggaaaaatagctggactttccaggatacagtgagtgagtacaagcaagttgctgtagagtgacaagaacctcacaagctaaaagaagagaaagcattttggacattgcgtaacagaagagaatatctactaaggtgcttgtcagctgtgaaaatgtctgacaagaaccaaatcattgccagggcttccttgattgagcaactggtgtctaaaaggttttttgaagaaatcancttgnagctgtcaagtctganttatattttggtatattntntccatatggcattccagggtggntcaccatggngcaatgtgntagtcctttacngagngacttacagagtcatcaacaactcaag

SEQ ID NO: 1168 - DNA, 414 bp, Homo sapiens
  misc_feature (1)...(414): n = A,T,C or G
caatgcttacctgctnttgnccgaagatctgaanagcgtgnggtatgggagggaccaggcagcaattacctgacaacccagagcgattngtcagtcctgcaanctgtgttgggagcccanattttcacctgcggnagacactactgggaagtgcaagnngngaaagaagacggagtggcaagtggngatctgcanggactttgngaacagaaaggggantttcncccaaanctgnccggggacctcttcncactcataggcttaaaaatcgncgaccnattacaagtctcttggnttncatctcccctgaaagggcaacatgtcncggagnancccgtgncntacaggctggngnagttntttggactatgactctgnancccataanccttatacaattgcgaacaggatgga

SEQ ID NO: 1169 - DNA, 318 bp, Homo sapiens
  misc_feature (1)...(318): n = A,T,C or G
cacaaacgtgtatcttggtatgcaggggnntaccagtaggacaacttatagaattggctctctccttnnntgngggtcccanagacagnactccggccatcagacttggaagccagcacctctaccagctgaatcatctttgcctgccttaaagtgaatttccttaagagggagaatgttctaggngtggcttcacagagacagtggttaccggccngttttntnagcgnagcttgaagtgggaggctgggtggcacacatgggagaccaaagagatgtgacttntttccctagcctcttttggtgtgtgtgtgtgtg

SEQ ID NO: 1170 - DNA, 167 bp, Homo sapiens
  misc_feature (1)...(167): n = A,T,C or G
aactgagggaactggaagctgcaagcatcctcagctgacaactgcacctccgcgaatggctgggtctctgtagtaaaactgcggtggnaggccattgtgattgtnatagacccngagaaacctgnactgacgcccttttaaactgcagtcaggaggaggctgactaa

SEQ ID NO: 1171 - DNA, 494 bp, Homo sapiens
aactgagattgccttgggtccccggtattcacgcccatcaaggcagacataagcggtaacatcaccaaaatcaaagccgtatatgacaccgacccagccaagttcaagaccctgcagaacatcctggaggtggagaaggggatgtatggggcggagtggcctaaagtgggggccactctggcactgctgtggctgaaaaggggcctgcgcttcatccaggtgttcctgcagagcatctgcgatggggaacgcgacgagaaccaccccaacctcatccgagtcaacgccaacaaggcctatgagatggccctgaagaagtaccatggctggctggtgcagaagatcttcaaggccgccctgtacgcagcaccttacaagtccgacttcctcaaggcactctccaaggggcagaacgtgacagaggaggagtgcctggagaagatccgcctcttcctggtcaactacacggccaccattgacgccatctacgacat

SEQ ID NO: 1172 - DNA, 265 bp, Homo sapiens
  misc_feature (1)...(265): n = A,T,C or G
aactgaggaaggggaagaagaaggagatgaggaaaacgatccagactatgacccaaagaaggatcagaacccagccgagtgcaagcagcagtgagcagtgactggccttgaggacggccgccctggcctaccttctgctttcctggaaaagatgaatatacatcatatgaacctattttgagtttttctgttgtttgtttgcctaattttgtttttatagcctaaaataaaaatatgacacagntttagctctcaaaaaaaaaaa

SEQ ID NO: 1173 - DNA, 115 bp, Homo sapiens
  misc_feature (1)...(115): n = A,T,C or G
gtagtcccgcttccaccaaaactctgtgtttcctttctctcaaaataaaactcaacaagccataaagcttncgacgccggtggaganggcgcccncgnatttatggcccctgaat

SEQ ID NO: 1174 - DNA, 544 bp, Homo sapiens
  misc_feature (1)...(544): n = A,T,C or G
gactgagagctgctctcaganctgctgctgctgctgctgctggcacganctntngtccgagtccnntgaggaggaggacgaagaggangaataggaccangnacaggccgaggaagaggaggaggaggagganctagagaggctttcatctgagtcactgtcttctgaagaggatgaggcggatgtctcactctctgatgaagactcactggccgaactgtcactgctagagatcnnctctnngtagananngttcttctttgtcttctttgcgacaaggtctcacgtancctaggctangcctgaagatgctgctgaacgcttgacccctccgcttcccttacacagcgtcacggatggatctcagaaccttgtgcatgctaggcaagcnctctgcaaactgagctacatctcancccgacttctaccctgtgcttggacctcaaaggtttcccaaatgantctctgctccctgatgaggagagtagctcgatcctgccncanacganccagcncgggcttcactctaaccatctccaaaaaa

SEQ ID NO: 1175 - DNA, 338 bp, Homo sapiens
  misc_feature (1)...(338): n = A,T,C or G
tcccacctgtacctgtgtctgtgtccagccaggaagacnngttgcctnanctacctcccctgcctaanttaccanacaccggntgagaactacgtgactcccattgnagactccccagcagccgaatacgtgaatcaggatgngcctctctccaatcaggcggtccntntgaagnccaagaagccngccnggntccnagcanaacnccnatagncatnagttgtgcctangccagatctcttagccatnnccngngttgaggaccaggangctaggtggaagntcntnccaggcttgctnccttgggacaagacttgnggntatcaccgctgagctgg

SEQ ID NO: 1176 - DNA, 240 bp, Homo sapiens
  misc_feature (1)...(240): n = A,T,C or G
gactgagaatagtatacaagcttcaggagggactccggaagccaagggcattgagaaacgcaagctttctcagaaacgaaggacactgtagctgccagcagcagtccatgagcatctccaagcccaagtacctggagcaactagaaaactacctgcgcaaggaactcctcctgctggacctgagcacggattctgcacaggaactgaggctgcaggtnaaagcccacagacccaacatgt

SEQ ID NO: 1177 - DNA, 133 bp, Homo sapiens
  misc_feature (1)...(133): n = A,T,C or G
gagatcttcgaagaactgttgctgtaactcttggtatatttggaacttatggcntacacaatccacangcatacagatactgtgaagcagatttttgctttagaataaaaaagctgtgatacaagaaaaaaaa

SEQ ID NO: 1178 - DNA, 512 bp, Homo sapiens
actgagtgtatcctgagggtaccggcgggtgtttgaggagtacatgcgggttatcagccagcggtatccagacatccgcattgaaggcgagaattatctccctcaaccaatttatagacacatagcatctttcctgtcagtcttcaaactagtattaataggcttaataattgttggcaaagatccttttgcttttttcggcatgcaagctcctagcatctggcagtggggccaagaaaataaggtttatgcatgtatgatggttttcttcctgagcaacatgattgagaaccagtgtatgtcaacaggtgcatttgagataactttaaatgatgtgccagtgtggtctaagctggaatctggacatcttccatccatgcaacaacttgttcaaattcttgacaatgaaatgaaactcaatgtgcatatggattcaatcccacatcatcgatcatagccctacctatcagcaccgaaaactcttttacactaagggattttgcaagagcagg

SEQ ID NO: 1179 - DNA, 410 bp, Homo sapiens
gaactgagagtcagtcgctttgaatccaagatccatgacttgcgggaacaaatgatgaacagcagcatgagttctgggtctgggtctctccgaaccagtgagaagaggtccttgtatgtcagggccctgtttgattatgatcggactcgtgacagctgtctaccaagccagggactcagttgaaggcaaagagggataaagtgacagatgattgtgactctcgcgagggggggtgagccgggaagtgttgattctctgatggtaactgacagcagtggacagtgctcaatcctccctcccagggaagaaaagcaaagattcgaagtaagcatgataatagttggtttaccagtgttccttccaaggagacatatattttttaataaatgatagttgcaatgaaaaaaaaa

SEQ ID NO: 1180 - DNA, 100 bp, Homo sapiens
gaactgagctctaagaacaggtggaattagctatggataattcatacaatttaaatgaacaaagctcatggaatggaatctcatctgagaagaaaaaaaa

SEQ ID NO: 1181 - DNA, 152 bp, Homo sapiens
  misc_feature (1)...(152): n = A,T,C or G
ttgattcaagatgtcacagacagtncttcccnnntggggagtctgacatttgaagaggaagaactgactcgagctgatcctgagcaatgccatgtgcccctgtgagtagaacgaatgatgatgcagtcattcctgaaaaatgtgggacaaga

SEQ ID NO: 1182 - DNA, 365 bp, Homo sapiens
gaactgaggtttagagtcaggtcctcccggccaatgctactggggaaatagcccaggcgggctgccaggtctccatagtaacctccctgaacctggagaagaagttaaaagtccatctggggaaacggcacttatgcttgctgaacgcctgtgtacaatcttccctcttacttgaatctcagcttaaatgccatttgctcatggatagaatgttgccactacaactaatcctcacaatgtcatgtttgctgccacttttgatggcttgctggttgcctgcctctacccctttgttcactgttgtatcccgggtatgaaaaagagctttggcgctaagcttctctgtaatttctaaagaaaaaaaa

SEQ ID NO: 1183 - DNA, 546 bp, Homo sapiens
  misc_feature (1)...(546): n = A,T,C or G
gaactgagattggcttgggcaaaagaatccagagaccctaggatttcagaaggccagcagtctccactggagaagaagatcctgagttttggtggtgtgcatacaacagcagcaagacacttgataactcagaaatgccatgaggagagcaaagcactctgcaaggagcaagctaattctctggactactggcttgcaaaagcagagtcgtattataataagagaatggtggagagaatgaaaaaagacacaggtgatgaaacaaagacaaaagtgcaagaggaaccaccatcaccatcaccaccaccaccaccaccaccacgcagagagagacagaaacagcattactgggtgcctgagagagagaagaagcaaatagaaaggcacattcatagaacaagccatgccagagaatttacagaccaaccctggagacagccacgactcttcagtgaaacaacactacccaaaattgtgctagaggaggaaagcatcccacaagcacagaaaagaaggcaggcncacgagagagaactgctccaaatt

SEQ ID NO: 1184 - DNA, 239 bp, Homo sapiens
aactgagatggatgtccatggcagaataagagaaattcttgcagagactatacgagaagaattagcaccggatcaacaacatttatcaacagaagatctgatcaaagctctaagacgtcgaggaatcattgatgatgtaatgaaagaacttaattttgtgactgatagtgttgatcaagaactcccttcttctccaaagcaaaccgttggttttgataagcagtcaacattaaaaaaaa

SEQ ID NO: 1185 - DNA, 457 bp, Homo sapiens
gaggctcgacttcggatggtagacattgtggagaaggaagatgtaaatgaagccataaggttgatggagatgtcgaaggactcccttctaggtgaaaagggacagacagctaggacccagaggccagcagatgtgatatttgccaccatccgtgaattggtgtcacagggggcggagtgtccacttttctgaggctgaacagcgctgcatatctcgtggcttcacaccagcccagttccaggcagctctggatgaatatgaggagctaaatgtctggcaggttaatacttctcggacacggatcacctttgtctgatagccagtttttacaccctcctgcctacaccagagggcatgctgaatgccccctcaagaaaaaatctcattctcccatgctgcacttttttattctgccaataaagtgttttgattgcctcttgcttgttaaaaaaaaaaa

SEQ ID NO: 1186 - DNA, 125 bp, Homo sapiens
  misc_feature (1)...(125): n = A,T,C or G
tgggattacagatgtttgctgagggaaaatggccagaaaatcctcattcctacgtttgttccttanaaaggctgttggggcaggtaatccagctcctgcacagttctgctgagagccacataaaa

SEQ ID NO: 1187 - DNA, 253 bp, Homo sapiens
  misc_feature (1)...(253): n = A,T,C or G
gactgaggctatatcggcgtggttaaccgaagccagaaagacatcgagggcaaaaaggacatccgggctgctctggcagccgagaggaaattcttcctctcccacccagcctaccggcacatggctgaccgcatgggcaccccacacttgcagaaaaccctgaaccagnaantgaccaaccacatccggagagtcactgtcgacccttcgcannaagntgnagagccaactgctgtccctggagaaggaagtg

SEQ ID NO: 1188 - DNA, 495 bp, Homo sapiens
  misc_feature (1)...(495): n = A,T,C or G
gaactgaggagtgccagtgcacaaccaaggnaagtccatcagctttattaacccatcaaaatcaagtgcagggaaaggatatgctgcctcaaacccaaacaaattggccgtatcaagaactatgggttttttaactgacatgaagccggcagaaaaactaaactgttcctagcgctaaaacagtacaggtgcttgattcaaaaggagttgatgtcacaccccgacctctctaccatccagatccacatgctgcgtcagcaaagccaaacaaactcttgacatcacaagaaggatcgcttggatcagattatatttcttcctatagcctctatcanaatacactaaaccctagcatgttagggcagtacacaaggtcagtcctggggagcagntcagtgtcgaagtcaagcatctcaacaactgagtcgatgtcagaggaccttgaagattcctcttacaagaggggatagattggccagttttacagatgtacga

SEQ ID NO: 1189 - DNA, 182 bp, Homo sapiens
  misc_feature (1)...(182): n = A,T,C or G
tacagcaagtccaaaggantgccnactctccanaggatttaactggnagnggnatgagacttctgatttcacagctcgntggctacctgaaagngaaaacaaaaattcannncatnttttatctatggcatgncngcaaancatcaaaanaaagcgattcttaaacccgtgaaaaaaaaaaa

SEQ ID NO: 1190 - DNA, 313 bp, Homo sapiens
  misc_feature (1)...(313): n = A,T,C or G
ccacaggtgtcggccagcagtatcctgacccagcaacggcatggtgnnatgtggggctatatgccaagagganagccgtctatnngganaactctctctatcagcctctttcttgcctcggganatncgngctcttctcaataagcctaaggctttactgntaagaatcccaggaggtttctgggataagacaccattgcttaaactcggggnatgcaggaaaggaaagggcagacactgngaagggctcatagaaaancactttcaacaattttgggaataccaaggagaagaatttcctagagaaaaagaa

SEQ ID NO: 1191 - DNA, 336 bp, Homo sapiens
  misc_feature (1)...(336): n = A,T,C or G
ctgagactgagtaagagagagagagaagagagaagnagaaggagaagatgaagaagaagaagaagaagaagaagaagaagaactgctttccctcgtntccttgctggtctgtcctccccnangaccctgacttgnaacaccnaanccntncacaaccagcancccanccangcancaaatgacacacaccaaggctcatctggctcctgaggttcaaagtgagttttnnttgtgttttattctaacatgttttttcagagttttctgctttgaaaatgaagttcttttttagctggngaagaataaataatatttccaagagccgccctcccagga

SEQ ID NO: 1192 - DNA, 520 bp, Homo sapiens
  misc_feature (1)...(520): n = A,T,C or G
tcatcagaaaagctaagtttgctatacagtaaggatcaggagatctgaccctggttgcagaaccattcctggttgcagaatacagggttgtattcccacttcatctttccagaccatcctaggaaatactaggaatccttggaagggaaagaaggaacattgttggttggaataaaaacagggttgaatgagttccagaaagcaggcttctcaaactcgtggacaacaatctgctgaagaagacaactttaagaaaccaactcgaagcaatatgcagagaagtaagatgagaggagctgcctcgggaaagaagtcagctggttcgcagccaaagaatctcgatccagccctgcccggaagatggggaggnccgctctgctgagaaccccccttccggttctgtgcggaagaccaggaagaaccaagcagaaggctcctggcnaacggagacggaggcagtacccaggggaagtcccccagcccccctcggaagaaaaagggcacggggctgacccccact

SEQ ID NO: 1193 - DNA, 360 bp, Homo sapiens
  misc_feature (1)...(360): n = A,T,C or G
actgagactgaggtatcagtccctcacctgaccctgttcctgaacacagtgcacccatctatgagttccggtgacagaggttcagaacagtggccaaataaaactgaacttggcaacaaananctttganaggaaattatgtacctgccatgaaccaggagaggtgtgttcctgtttgttcacgagcagacttcatcagaaagcatgaatgttaacctacaggatccaaggagcatggccaacctgcaggcaggcagagggagctgttcacctcccaccctccttcctctcagtggcattgtggtcaccatctgtttctgaacaaccttaaatgcactttccttcctgcacagctaactt

SEQ ID NO: 1194 - DNA, 421 bp, Homo sapiens
  misc_feature (1)...(421): n = A,T,C or G
acactcacgtccttgtgcagccttcgccaccatcctccttcagaactcattcatctctcacagttgaacctttgcncacatgaaacagtnagtctctctttttaaagataanttnctattttgattatacatgtggatgcagatgcccttggagaccagacatgtnggagttgnggtgaagatggttataaaccactngangtggngttgtnctggctgccctataactcactntggggnccaggctagcctgaactgcgatgtcttttacctaggttttttcctcccagttcactgatcctgtnntgcatgncnnannnnacctcccttaaanacatatannccaccannntntgcancaatttcagaaggctcaaggngggggacgccctggccctatnttgaccaggtgaaactgcag

SEQ ID NO: 1195 - DNA, 536 bp, Homo sapiens
  misc_feature (1)...(536): n = A,T,C or G
gaactgagagtcctttggacagaactacccagtaggtaagctgatgggactctggactgcatcagcatggccctgacctgcacctttaacagaagaccctnaataaannnctgntggccntccaccgnatgcagtcncaanctncttgatggaggaaggggctngtgtcagagaanaanaggcacncttcannacanggnncccatncaccaaagangaaacntanacccaccantatanggntncaaggagagccgaatgatgaantccatccactactgngngtaaagggggatggcaaatcgaaanaagantcaagcangccggcctaaaggatnaaaagcaggaggagccatctcagaactgctgngaanaccgtggaacccttggttcttctcactctgtcatcaggtancctttggacagngtggccaatcatctgagattggctttagttgaaaacaaaggcctntgcctcccacccaggaggtgaangagnggattttnngtttgaatgacgaaggcgaattatgccg

SEQ ID NO: 1196 - DNA, 333 bp, Homo sapiens
  misc_feature (1)...(333): n = A,T,C or G
gaactgaggaagaaatggaagccagaatnaagcaggtactccgctccctgcgtctggagctgggtgccgaggtactggtggaaggactggttcttcagtacctttaccaggaaggaattntgacagaaaaccacattcaagaaatcaaagctcaaaccacaggcctccggaagacaatgctgttgctggacatcctgccttccaggggccccaaagcttttgacaccttcctcgattccctccaggaatttccctgggtaagagagaagctggagaaggcgagagaggaagtcacagccgagctgcctacaggagaaaaaatccctggaagca

SEQ ID NO: 1197 - DNA, 226 bp, Homo sapiens
  misc_feature (1)...(226): n = A,T,C or G
gatgcgtttggcagagggagcagtggagattctangtcngggcttaaggcctggggcttccaatgatnctctggtnatggntggangcctagatgcctcaccgcanggngcaggacgngngggtcctcncttaantgcacacnggcagcaanangcacaggcggagggaggaaatatagnccnggctgtcactcaccntntcggntgtgtctcccctggttgacca

SEQ ID NO: 1198 - DNA, 111 bp, Homo sapiens
ctagactgagtccaggctgatactgatttgggcgccttggctgcagaaatagaaggagctggtgctgccaaggagcaggagcctcagaagtcaaagggaaagaagaaaaaa

SEQ ID NO: 1199 - DNA, 385 bp, Homo sapiens
  misc_feature (1)...(385): n = A,T,C or G
agcacacagctggggcttccctaggcgaggagagatggatctgatccgtatgggtttgaaaggcccgaagactttgactatgcggcttatgaagaattnttttccacgtacctggtgatactcaccaagagggcgatcaaatggtccaaacttctaaaaggaaacggtggtgtcccggaaaagcgtgacagngaaacgctatgtccngaagggaatccccgntggaacatcgtgnccnnncgtgtggatggctcgngagtgganctcaggccccggatggaccanagccntgnatacttaccatcgactgctnccanggcnagatcagctccaggtctggacnaggtcncattaggacannacttgtaccggacattccctgact

SEQ ID NO: 1200 - DNA, 303 bp, Homo sapiens
  misc_feature (1)...(303): n = A,T,C or G
gaactgagtgtcttctaattgttgccatcatgacggagtttgtatgccttgatacctttatgctgtttaagaatcatgtctttgggggactggagaaatgactcaacagttaaaaaagcactgctgctcttccagaggacccaagtctgattcccagcacccacatgatgttcacaactatccttaactccagttccaggggatntaatgctctcttctgatcttntggagtaccaagcacacacatgatgtacagacatatatacaggcaaagtacacatacaataaaatgaataaatctaa

SEQ ID NO: 1201 - DNA, 316 bp, Homo sapiens
  misc_feature (1)...(316): n = A,T,C or G
gaactgagagcatacctgccctgctggagttcatacccattcctgagcaacactggtttttgccatggaatccgtanatccagcttgtctgtgcagtaggccactgttcaaaatgaaganaaggaaaaaagagagtggcaacacggaagccagccacacacctgggattgcnggctctattcgtggatcttaatgagtaacaaggaaaagcaaaatgctatttatctttttggcaaaaattaattgntagtatttcatgattctagagatgtatttctccaactanaataaaatttttggatcgtaaaaaaaaaaa

SEQ ID NO: 1202 - DNA, 286 bp, Homo sapiens
gaactgagggcacagagaccgtgaagtctgcaacacggctgctcatcagcttccagcattcccagccatcgaagtccacagtggagtggctgctccctgggcacctgtgaagattcaggaggaacccacggtcacgctttatgcctttcaagtcattccatctggaaagatgaacagaatgagaaatgtgtgtgtgtgtgccatagaagttgttagttcatacgttcaaatgccttggcatttattagttttgagtaaaaacaacgttacctttcaaaaaaaaaaa

SEQ ID NO: 1203 - DNA, 432 bp, Homo sapiens
  misc_feature (1)...(432): n = A,T,C or G
gactgagaccctgtcccatcatttgaggtggcgcggactctagacgacagactgcagcgtcccagctttgaccccagtgggcagcgcctacaagacgtgcacatcgcgtggaagaggtgcccanagccacccantgccagagagcanaangaggggacagtgtcccacggggcacacgccatncaanggtaaccacntgccanagtcccgaggacaccctcgtgacagacaccttgctgcagaagaatgaggccgagagacagangggtctccaagaagtccacatcaccttggcagccaggctgggggaggcagaggagaaaatcaaggtgttacattcagcgctaaaggccacacagacagagctgctggagctgaggaggaaatacgatgaggaggctgcttccaaggccgatgaggtaaaaaaaaaaa

SEQ ID NO: 1204 - DNA, 188 bp, Homo sapiens
  misc_feature (1)...(188): n = A,T,C or G
agactgagtacaagacagcaaaatacaactgccaattatacagctgcggaaagtatgggctgaagcagtgcactacgtatctgggctaaaggaagactacagcaggctcttccagggacaaagagcagcaatgttnnnagattgtgttagaagcgtagnagccatgtgtatcatgtactcaatgaatt

SEQ ID NO: 1205 - DNA, 457 bp, Homo sapiens
  misc_feature (1)...(457): n = A,T,C or G
atatatctatctggcctttncaaattggnccctgcnnantggcttncacnaagaagggttntngtangaaganggnccatcatcgaggtggtgatccangantacaccatcntcattnacnagcncattcntagngtgganttcattangccgtgctccttggacactcnnaganatccanangttngctatgaagganntgnacgattccngatgtncatatngacaccnggctcattaaagncatgtgggtcaagggaataaggaatgctccattgcatctgagtatgttcgtccagaanacatagtacggaggaggagtcaccagacaagctttacacattgataacttactgnctgtnaccacattcaaactctacagaangtcaatgtggatgaganctaacctgctgantgtcaaataangttgcagaactgccaaacaggtaaaaaaaaa

SEQ ID NO: 1206 - DNA, 325 bp, Homo sapiens
  misc_feature (1)...(325): n = A,T,C or G
gaactgaggtacctttcagatgaaggcgttgaagcctgcacaagctctcctgggaaaggcagcataaatgacatcatcctgattgctctcaatgnagannaaggcacctatgatcacaccattgnntnccgcaaaggaggtgatggacagncacaaaggnntactnggccancgcagnaantntaccaanctnctcgagctnggaactaangngaangggcttttgagaaggaagatccactgactganccatnctggaagcccactgatngattttccacttnttcagagagagactcaatatgctggatatgatttttggaga

SEQ ID NO: 1207 - DNA, 470 bp, Homo sapiens
  misc_feature (1)...(470): n = A,T,C or G
tctgacctggcgtttgatgananagattggaagctccaagtcagatcntgaaganctttnangctcctccacaaatctcnncgaccacnncccttcatcctggcgagaccacgatgacgcaacctcaacgcactccgcaggcaccccaggaccctccagtgggggccatgcttcccagagtggagacaacagcagtgagcaaggcgatgggttagacaacagcgtagcttcacctggcacaggtgatgacgacgatccagacaaggacaaaaaacgccagaagaaaagaggcatattccccaaagtcgcgacaaatatcatgagagcgtggctcttccagcatctcacacacccgtacccttcagaagaacagaagaaacagttagcgcaagacacgggactgacaattctgcaagtgaacaactggtttatcaatgccagaagaagaatagtgcagcccatgattgacc

SEQ ID NO: 1208 - DNA, 260 bp, Homo sapiens
  misc_feature (1)...(260): n = A,T,C or G
ctgagactgagcatgcatgctttatacantccataacacatacgatgacattgaaancactnncggttgcagatctaggatgnggctgtggngtacttatnanntngaacaggcaatgctaggagcagggttgngtgttggatttgacatanatgaanatgcactagnnaatatttaatatngaatngcggaanagtgngagctaacantggttgntatgatncntagtgatgtgtactcattatctaacagaatgtcca

SEQ ID NO: 1209 - DNA, 358 bp, Homo sapiens
gaactgagatggccgccaagagcgagttatgtttgacaaaattacatcacgaatccagaaactctgttatggactcaacatggactttgttgatcctgctcagatcaccatgaaagtaatccaaggcctatatagtggggtcaccacagtggaactggacaccctggctgctgagacagccgcgaccttgaccacgaagcaccctgactatgccatcctggcagcaaggatagccgtctctaacttgcacaaagaaacaaagaaagtgttcagtggtacgtctggtataaaaacatgagaaagcgtttaatagtgtcataaaattataggaataataagtgaattttaaaaaaaaaaa

SEQ ID NO: 1210 - DNA, 543 bp, Homo sapiens
  misc_feature (1)...(543): n = A,T,C or G
tgaggtgccctatgagacactgaacaaacgcttccgagctgctcagaaaaacatcgatcgagagactagccacgtcaccatggtggtagctgagcttgagaagaccttgagtagttgcccagctgtggactctgtggtcagcctattggatggtgtggtggagaagctgagtgtcctcaagaggaaggcagtagagtccatccaggccgaggatgagagcgccaagctctgcaaacgtaggatcgagcacctcaaggagcacagcagtgaccagccagcagcagccagcatgtggaagcggaagcgcatggaccggatgatggtggagcatctgctacgctgtggctactacaacacagctgtgaagctggctcgccagagtggcatcgaggaccttgtgaatatcgagatgttccctgacagccaaagaagtnggaggagtccttggagaggcgtgagacagccacctgccttgcctggtgccatgataacaagtcccgactccggaagatgaagagctgcctagagtttcagcctcaggtc

SEQ ID NO: 1211 - DNA, 275 bp, Homo sapiens
gaactgagggccggcacatgggtgagggggtaccccctggggcgtgagctgccccgcacaggatgccccgtgccccccactccatgcccctgctgctcctgctgctgttgctgtcatcgctcccccaagcccaggctgcctttccccaggaccccacccctctgttgacctctgaccttcaaggtgcctctccatcatcctggttccggggcctggaggacgatgctgtggctgcggaacttgggctggaaaaaaaaaatttttaaaaaaaaaaa

SEQ ID NO: 1212 - DNA, 537 bp, Homo sapiens
  misc_feature (1)...(537): n = A,T,C or G
tgggaaaccggcaccagtcgactctacagtgctctcgccaagaccgtcaacagcagtgcagctgctcagcacccggagtacttggtgtcagctgaccccgaacatctggagcccatcgatcctaaggaacttctggaggaatgcagggctgttctgcacactcggccaccccgctaccagcggggattttgtggacctgaggacagattgctccagcagccactctcccattcgcgtcatgcagtggaacatcctcgcccaagctctcggagaaggcaaagacaactttgtgcagtgccccgtggaagcgctcaaatgggaagagaggaagtgcctgatcctggaggagatcctggcttaccagccagacatactgtgcctccaggaaagtggaccnctacttttgacacctttccagccacctcctcagtagactggggctaccaangcaccgttttttccccaagccctggtcaccatngnctagantgtggaancacaacaacggtccaagatggctggtgccttatttttttc

SEQ ID NO: 1213 - DNA, 158 bp, Homo sapiens
  misc_feature (1)...(158): n = A,T,C or G
gaactgaggttgctgttctggctgaggccatctatggccctggnagtgttttcattcaagacaaagtccattccatctttatttattagctgagcaaattcagctaataattttcaagacccagattcaagcaataaaacatttctctgcaataccaa

SEQ ID NO: 1214 - DNA, 123 bp, Homo sapiens
  misc_feature (1)...(123): n = A,T,C or G
gactgaggtgctgctgacttctgataaagctgcggccaatttctcagatcgttctttgctgaagaacttgggacattggttaggaatgatcacattagctaanaataaacccatcttacacac

SEQ ID NO: 1215 - DNA, 543 bp, Homo sapiens
  misc_feature (1)...(543): n = A,T,C or G
aactgaggtgaagagactgttttctgaggctgcgttggaggctgtgaccgagcagagagcccatgtgaactgatggggaggctttctgaataacatggccttttgccattagccttgccatgaccacatttttcaccagcagtccctccctggattcaagatgcaaagcaggaggaggaagtgggctaggaaactagttcccaggcctcggggccgggaggcagagagtcaagtgaagtgccaatgtgaaatctcggggacaccattttcaaatggggagaagctaaggcctcacagccttccccatccggagcagagaccatatagctgtcctcagctgcactgcggcaaggcttttgcctccaagtacaagctgtataggtaggtgacactcccattcctctttcagtttccaggttcctggagctcacaaccagagactccattgagagtgaacggtaaagntgtcctgtgagtatactatgaactctaaccatttgaagtcactcactaaatagtaataatggtttagctggatatgga

SEQ ID NO: 1216 - DNA, 307 bp, Homo sapiens
  misc_feature (1)...(307): n = A,T,C or G
gtgttccaatttgcaaggcaagaaggagttcatggtttttatgacttagcagtggaagccaaactatcactttcaccaaattcaacgtattaacagcaagtcaccaaccattcagggctggagaggtggttnagnagntagggctgctcttccagaggatcccagttcaaatcccagcatccacatggnagctcacagcantgtgtaactncagttctggggattccagcncccccatacagactgtacacgcngccaaaacaactaagacataaaatantgataaatacattctttaaaaaaaaaa

SEQ ID NO: 1217 - DNA, 546 bp, Homo sapiens
  misc_feature (1)...(546): n = A,T,C or G
gaactgaggagtaatggagtccaagcatcaaggcgtgaaaaatctcaacatggagaatgaccatcagaaaaaggaggagaaggaagaaaagccacaagataccatcagaagggagccagctgtggccctgatctccgaggctggcaaaaactgtgcgcctagaggaggtcgcaggcggttccgggttcggcagcccatcgctcactatagatgggacctgatgcagagggttggggagccccagggaaggatgagagaggagaacgtacagaggtttgggggtgatgtgagacagctcatggagaagctgagggaaaggcagctgagccacagcctgcgggcggttagcactgacccgcctcatcatgaccaccatgatgagttttgcctcatgccctgagtcctgagcttttctctgaagatgacatggggacccctgccttgtgatgtacaaattttgaggttactcctttttatgtagatctctccctgttaccagcttctaattgaaacttgngntttttactcggcctataattaagcaaa

SEQ ID NO: 1218 - DNA, 352 bp, Homo sapiens
  misc_feature (1)...(352): n = A,T,C or G
gaactgaggtgacaggacaccctcaagggctttgatgagaaggcgtacctgtcagccaagcagctgaagcctggagaggacccatacagacaacatgccttcaaccaactggagagtgacaaactgagctcagaccgacccatcagggacacccgccattacaggtatggcatctgctgagtggacaggaagggaaaactaagaaaagaccagtgttggncagcttggtttntttcactcatatgtgtttattgatttattacatttatttaccttattcatgtgtctgtgtgtgtgtgatcgtgcacacatgcaaactgtatatattttacaaataaatatgatgtcctca

SEQ ID NO: 1219 - DNA, 286 bp, Homo sapiens
  misc_feature (1)...(286): n = A,T,C or G
cgttcctggaagaggaggaggaggaggaggaggagagaccaggattcgaactcaggcccagcttcgatacgctatggaatcactgncagggccagcttcccctgtggctgagttcctgtctttgatagatttctgtgaaatcctcacagccttctcaattagcagctggcatctttattgattgatcaaaaaccaattggggacaaggaccttcagcatttggacaagcagattcccgattaaatcaaagcattagaaccaattctcaacagtgtaaaaaaaaaaa

SEQ ID NO: 1220 - DNA, 479 bp, Homo sapiens
  misc_feature (1)...(479): n = A,T,C or G
cgttctgacgccagcactgagattctcttacctgcctttgtagttattcacatcaaagatcttctttgcacggtantacacgagcttccagggccngancagatgcccttccctgcagagaggtggaanacagtcagagaggcggcntgnggccatcgtgagatggtcacaaacaccaaaggaacctactggagccctgcgtgacatggttaagttcatgtgcagcagtgtgcagaggcatgctggacatanaggcatgctggggctncatgcncctgcnctgtcagaacaggtacagttaacactgccttgaggagcaagngcacgctgggtttgcagatccactcaccggattgccacttnaacatcatctgagaggcaccaagctcattatcncccagncaangcctccctacctnccctctctnnanaagagccttctcctgcccnctgccctncctgtgtaaactgaaaacact

SEQ ID NO: 1221 - DNA, 194 bp, Homo sapiens
  misc_feature (1)...(194): n = A,T,C or G
atcagtcaagaagaattanaagaataaggttgggatccactgntnccacanatgaagacntgacncccagcccagaccnnganccagaccctaccgaganntntgncggaaataatggagacctgtcaccctgcaaggtggaagaaaacncngcccagaagaatacagaaacagcctctggcatcggggatgaa

SEQ ID NO: 1222 - DNA, 439 bp, Homo sapiens
  misc_feature (1)...(439): n = A,T,C or G
aactgagatggccgccccattggggtggagggcatccaggtgctgggcacaggaaaccttatcatctcagatgtgactgtccagcattcaggtgtctatgtctgtgcagccaacaggcctggcacccgggtgagaaggacggcccagggtcggctggtggtacaagctccagcagagtttgttcancatccccagtccatctccaggcctgctgggaccacagccatgttcacctgccaagngcagggggagccaccgcctaatgtcacatgnttgaagaatggacaagngctgggggcaggaggccatgtnaggctcaagaacaataacagcacacttgagcatttctggagtcggacctgannatgaggccatctaccaatgtgtggctganaacattgctggctcgncncaagccagcgccaggctgaccgtgctg

SEQ ID NO: 1223 - DNA, 104 bp, Homo sapiens
  misc_feature (1)...(104): n = A,T,C or G
aactgaggtgtttggccttggttccgtggctcacatggttttaggagaaaactctggcagctatctcggcgtcnacttgggttttggattcggagtgaccatgg

SEQ ID NO: 1224 - DNA, 301 bp, Homo sapiens
  misc_feature (1)...(301): n = A,T,C or G
gactgagggtaaacttgatgattaccaggaacgaatgaataaaggggaaaggctcaatcaagaccagctggatgcngtatctaagtaccaggaagtcacaaataatttggagtttgcaaaggaattacagaggagtttcatggcattaagtcaagatgtaagtaaaaaatactgtgtaaaatataaaaattaagttagtggaaactatttggagttagtctgtacattactgttgatgagttctctgccaggtgtggaaattggattaaatcatttcttattaatttgccaaaaaaaaaaa

SEQ ID NO: 1225 - DNA, 321 bp, Homo sapiens
  misc_feature (1)...(321): n = A,T,C or G
actgagggctggagggacatctgaagaggtctcatcatggcggacagcnctctggggacagctttngngatgcctanacngagggntggntactgnaccatgaacacantggaggatncctcctttgcttctttncgcttttctcctgntttaaaaccccatagtaaagtactttctttntctccttctttcttttattaacattcagaaatacacctgtnntgngctgagttattntggaggataaatnatagtttttgctttngtgaagnnggcattnncacctttgccctaanaaaatngagtgtagaaataaaaaaa

SEQ ID NO: 1226 - DNA, 497 bp, Homo sapiens
  misc_feature (1)...(497): n = A,T,C or G
aactgagcattggaaaaaggtcagcaaggatgtctcagtgggtaaaggcaagcctgatgttctatcaggtacctgcctgtaaggaaagaatggacttctgaaaaatgaaacaggagagtcagagcctctgagcaagacctgggaggtgctctggagtgctctgatgaaaccttacagaaaaaagtgaagtcggactcacctagttcccaaagagtgggaagacctcaatgacctcttactgcccagggaaaaaggattggaactcattaactctttgtgaaccagagagaaaagaaaggaagaaaattggaggctggagagatggctcagctgttaagaacactgactgctcttccaaaggtctangagttcaattcccagcaaccacacagtggttcactatcatctttaatgggatccgatgcccttttctggtgtgtctgaagacagtgtactcatatgcataaaataaataaatatttctacaaacaaaaaaa

SEQ ID NO: 1227 - DNA, 411 bp, Homo sapiens
  misc_feature (1)...(411): n = A,T,C or G
aggaggaaagcctggaangctcccaccaagcggcggcggtncacggntntgatggagggaaagnacatgntccacatgcccaaggggaccacngccccgcatccgtgangatnctggagcaccancangcagcctaaggtctccatanaacatcncgtagtttnatcgncttggngnttgattncanagcagacaccnagcacagggactangcctttttgagttttcagccgcttagggnctaccccanagatggatgagtgatctgnccttgggacagtnacaatgacggnnngcantagcttctgtnctagcantatnctagnnntcctganngaaactaggaccangccccaaccaaggccangtgcccaaccagnnctgactgccaaagccaaaagccaccaagct

SEQ ID NO: 1228 - DNA, 436 bp, Homo sapiens
  misc_feature (1)...(436): n = A,T,C or G
gacgtgaacctggaactnaccaactctgctagactgngnagcnntgncaatngctctagcacagatnaactnngagggcntnanncccactgaaataagccagngacaaaaagaccgnatgttgtgatcacacttaaataaggnangtanactgtctggtcaagcangtaggggcanacgagcagaacggctagcccgctangggatgtggggagggcagaatgggcatttgttgnttaatggatgtaaaggttcagttntgcaaaaggaaaaggtgaggcttgatgacattgctctctagcagaacgctcanctagcatttctgagacctganntcatgtncaacagctcatgcacacacacatgcacaggagaaagaatggaangaanctaccccttttacttaaaaaaattgnattnattttttattttatgg

SEQ ID NO: 1229 - DNA, 524 bp, Homo sapiens
  misc_feature (1)...(524): n = A,T,C or G
gaactgaggtgtgatccgctcactgcatgagcatgggccgattggagcataccttctgcacagagacccggccctacaaccagggagcccggctgacggccttcgagctggtgtacgagcagatccctgcaactctcatcactgacagcatggcggcggctgccatggcacaccggggtgtgtcagccgtggtggtgggagctgaccgtgttgttgccaatggagacacagccaacaaaataggcacctatcagctggccattgtcgccaaacaccacggtgtccccttctatgtggctgcccccagttcatcctgtgacctccatctggagactggaaaggagattgtcatagaggaacgccccagccaggagctaactgacctgaatggagtcaggattgctgcacaggaaatccggntttgggaatcctgcctttgatgtcaccccccacgaactcatnacaggnggnatnatcactgaactgggtgnntttgcccctgangagctccgaggagccctaag

SEQ ID NO: 1230 - DNA, 107 bp, Homo sapiens
tgagactgaggggaggcacacggtccaagtccttttactttctgaggatgggcagatcctggcagaagcagatggactgagcacaaaccactgggtaaaaaaaaaaa

SEQ ID NO: 1231 - DNA, 454 bp, Homo sapiens
  misc_feature (1)...(454): n = A,T,C or G
ggtgtcaacatctccagggggcccgaancgccatctcccgcgccgccagtgtcttcgttttgtatgccacatcctgtgccaataacttcgcantgaaaggaaagcgcaagactctcaatgccagtgacgtgctgtcagccatggaagagatggaattccagcgattcataacaccattgaaagaagctctagaagcgtacaggcgggagcagaaaggcaagaaggaggcttcggagcaaaagaagaaggacaaagacaaaaaggattccgaagagcaagacaaaagcagagaggaggaggaggaggatgaagagagactggacgaggacgaccagaacgaagaggaggaaatagacaactgaatggagagagtaggcanactgtggcgtggtggaggggaccctgagatcctgagacatgtctgtgtgaaggctttccctgcaaggcagagcca

SEQ ID NO: 1232 - DNA, 295 bp, Homo sapiens
  misc_feature (1)...(295): n = A,T,C or G
ccctgttccccaggcagagtacanaactnagcnttgctggtgaaggtccnactggaggacacccaagttcancatgatcttgacagacctgtgactgacctgaccctccctncagtcctgtgccactgacacatatgcttgatgccttctgctttgtcctagtacccaagacggtgagtgaagcaggggtcaaaagttcagttctcagctgcatagtgagtttgaggccagcctgggttaaatgatacactgctttaacacaatgaaataaaggacaggagagattggtttggaa

SEQ ID NO: 1233 - DNA, 361 bp, Homo sapiens
  misc_feature (1)...(361): n = A,T,C or G
gactgaggtttatcatggcttccagcccaccgtgttgatgcggctggtagcttcagcatattctatcgctcaaatggtactatnnttaagngaagaantgaaagagggttagttccaantgactgtccaggtcattctgtgcacgtcancattnctgccgataaaccaganttcttcagggcacagagncttaagttactccagantttcagtngtnatgntttttcacagtantttttaaaatntntgatnccaaataagaangcatatagntgatattattnatgtcngatttatgggggaaagttnctctaaaancatagtcctatctttncatattatatatcagatttttttcaaa

SEQ ID NO: 1234 - DNA, 504 bp, Homo sapiens
gccgaggaccagcagccaagcactaggactggacatcccagcaatgaccagctctcctgtctccagagttgtctacaacggcaagaggaatagcagtccccgctctcccaccaacagcagtgagattttcacaccggcacacgaagagaatgtgcgcttcatttatgaagcctggcagggtgttgagcgagacctgcgcagccagctgtccagtggtgagcggtgcctagtggaggagtatgtggagaaagtccccaaccccagcctgaagaccttcaagcccatcgacctgagtgacctgaagccgccggaacacgcaggatgccaagaagtcctagagctcctggcgccctcccctggcctccagaagctcaggtgcacttgatggtggtttcctgtgttcctgtggcgctgctcctggggggaagagtgtgctctagcaggccgggatcccagagccagcaggattgatgaccagggcccttcctttcctctccagggtct

SEQ ID NO: 1235 - DNA, 405 bp, Homo sapiens
  misc_feature (1)...(405): n = A,T,C or G
actgaggtggggtctttcacgatgacccgagagtgacgacgacgacgaggaggaggacatggtctcggaggaggacgaggaggaggaggaggatggctgacgccgaggagacccaggattccgaggacgaggaggaagatgacatggaagaagacgacgatgactccgattatccggaggagatggaagacgacgacgacgacgctagttactgcacggaaagcagcttcaggagccatagtacatacagcagcactccaggtaaccacccaggccgccgggagactccttccccacctcctccctccccctggcttgctccctctccagtgcagtgcatcctgcttcctanctccccccccccttcccggcctgtcccccacgcggaggccacggcgcgtttag

SEQ ID NO: 1236 - DNA, 556 bp, Homo sapiens
  misc_feature (1)...(556): n = A,T,C or G
gactgaggtgaccataggacngnggcttaccggcacntaccacctgatatcanaggtntgccctctgatgatttcccnaagccacctgaggnntgngaancataaatcctantgncacngaaggaccattatggaccataggaccctgaataggtgtttgnctatncagagaacnctannctcctattaacnggtatattntnttcgancngnagaccntntncntgtcggggtgccccgtnganagcagagtaaacggntggataatagagtacgatcgacanctgaagaagacntgagnagagtttagggtccctgagcttgccccgaatanngancnaagagngggaggacataagngctcgagaactaagaggantttcagttcgccttggnttagagaatcttccagccgagggctcctcagatctcagatgcccactggctaatgtcgccagtaaacccattgagccagagaagttgcatggcaaaggtgacgcatcgagtcagtccttgggatgcttgggncctgggctgacttctctgaaggcgaacg

SEQ ID NO: 1237 - DNA, 461 bp, Homo sapiens
  misc_feature (1)...(461): n = A,T,C or G
ggttgcagacaatgatggtgagttcctgttaatagaagcggccgactttctccctaagtggttggaccctgataacagngccaacagggtgttttttcatcatggggagctgtgcattattcctgtgccgaggaaatctgaaaggataccatggttacccatgacaccaccaacaatccagcaagctttgagtataatctcggcacacccagaagctgttttggcttnnnaatctatacaagctgctgtggacaggcgcgtcagtgggtacccagaaagggtcgaagcatccctccatcgagcacactgcttccttccagccggcattgtggcggtgctcaagcancagcccaggctgctgtcggcagccgtccanggccttctacctacgggaccccatttgacctaagagcctgtcgtgtnttcaagacatttttgcctgaaacacgaaataatggcct

SEQ ID NO: 1238 - DNA, 289 bp, Homo sapiens
  misc_feature (1)...(289): n = A,T,C or G
tgaggtctgtttctgcaggcatctncgtggctccatgantcttccctttgatgacagagacctggnctgtgagtgggagagngaagacctgcccctgaccattcagcttccattccgncttatcctgcntgtngggnacctgccctttgatgaatactggatccccctgtgcangaactcttggctaatgacatgcatggattgatttaccttacatagcgctattgagctcaaattgtgataatgctgccattgagagaaactcacccacgaactgcttataaaaaaa

SEQ ID NO: 1239 - DNA, 465 bp, Homo sapiens
gactgaggaatttaactaagatgatggcaacttgtactccaagaaagaggaagcgatatacactgaatgctgataatgatgatagcctattaacagatatttcatcaagcaaattaagatgtgctgaaaatctatttccatcacctaataagaaacataattatcaaagcagtgttcaaaaggaagacaagtcttgctcccaccaactccatttcccttcaagtccactcaaaacaactgaaaatagtaggttttcatttgcaaaccacagctcattatttaaaccagctatgtctactgtatctttctacagtaaagagaaatactacctcaatccactcgagaggaagttgataagagagtgtagatctatttgtctagcaactgaaagtggagataaacctattcccagtgtgacagaaaatattcagagaaaaccagtctgtaccaagaagaataaaaaaa

SEQ ID NO: 1240 - DNA, 386 bp, Homo sapiens
  misc_feature (1)...(386): n = A,T,C or G
gactgagtttttagttgcatttttaaagaaggaaggctcatggtgcaaattgttatttccagtacgggggctgaaggcctggcagaatgggtgctgatgganctacagggngagatcgaggctcgctacagcaccgnattagctggaaacctcctgggagacctacattacaccactgagggangagatgtnatcnacnntacccnagcctnaatcctgcttnctcnnatngnagnnttnngctcattcgntntnccacgcccactgntggaacntgaggagccacacacngncacctttctactggaccagagattattnggcngggaantnggctcccctccnncttgcttcatnactggtgtcgcaacaataaaattagaacc

SEQ ID NO: 1241 - DNA, 533 bp, Homo sapiens
  misc_feature (1)...(533): n = A,T,C or G
tctcctggtctgtgttctgattcttctttggaggagagtttaaggatcacagttggcaatgaccacttctgtgttagcacaccagagcggcggcggntcagtgaccggctgggatctccagtggatggtctgcaggacatggacagggatgacctgactgatgattctgtcttcactcgaagctcccagtgttctcgggggtcttgaacgatacatttctcgggaggagggaccacttagtccctttcttgggacaacttggatgaggactaccgaacaaggagaaacttttctgcatcgacctggagtttagtccccagagcagttgtcatgatgaattngttgagggaaacagagcggtatnagaaacaaacttaaaagctcctcctattccatacgatctgaggaaagaggccgggaggccaaaaaggcccccgtttttgatgacncagagaagggtacnccagctcaaggaggggggatcacttcaangttttnacatcnngggactcgaaaacctatcggggaggcgg

SEQ ID NO: 1242 - DNA, 306 bp, Homo sapiens
  misc_feature (1)...(306): n = A,T,C or G
gaactgagatggcctcacggtacatgatccagctcacttctgtgttcaaggatgtctgtctaacgccagaagagatgaatctcgtggtggccaaagtgttgacgatgttctcaaagttgaatcttcaagaaattccacctttggtctatcagcttctggttctctcttccaagggacgcanaaggagtgttcttggacgnatncatagccttcttcagggagctggataagcagcacagatacattttttccacataagaatgcactttggcttatacaataaaactttaaacattaaaaaaaaaa

SEQ ID NO: 1243 - DNA, 541 bp, Homo sapiens
  misc_feature (1)...(541): n = A,T,C or G
cggagcaccataacatggngtgggaagtgaagacaaatcannatgcctaatgcagtncagaaactcctgctggtgatggacaagagagcaccagggatgagngactcgctggagttgctgcagtgtaatgagaatttgccatcctctccaggatacaactcctgtgatgagcacatggagcttgatgaccttcctgaacttcaggctgttcaaagngaccctacccaatctgncatataccagctaagttcagatgtatctcatcaagaatatccaagatcatcttggagccagaatacctnagatataccggaaaatactcaccgtgaanatgaggnggactggctaacagagttangcaaatattgccactagtncacaaagtcccctgatgcantgctcattttataacaggtaggagcatggattatgttttgcnttntcanacttgcatttattaggggccagcaatnatactantgtaagctncanntgggttaangaanccttgcccaccaagcnctgaagggcgcaaaccttg

SEQ ID NO: 1244 - DNA, 340 bp, Homo sapiens
cacaacacagtcggattcttctcaacagcctttattgcaggatcgccttgatgcttctacggggaccccaggcgcccagggagccctgcttatatgtaccccagcacaggagaaggctccgtggccccctggggttggtcagtctgccagcacccaatttgcatgcacccgcttgggaggggttggccccaaattcgaattgacgcctgcgcagtggtgttgtttatgacaacggcaaccggaaaccggcgccatcttggagttggcttcccacagagaggagagggagaggagagggagaggagaggaagaggaagaggaagaggaagaggaagaggat

SEQ ID NO: 1245 - DNA, 537 bp, Homo sapiens
  misc_feature (1)...(537): n = A,T,C or G
gaactgagagatgaagcagatgaatcttgtcactgggaaacagngcctaataaagagggctcctttctccatcagtgccttcagttacatctgtgagaatgaggccatccccatgccaacccactggganaacgtgaaccctgacgttccctaccanctggtttccctgcagaaccagacgcacgagtataatgaagtggccagtctttttgggaaaacaatggatcggaaccganttaaaaggattcaaaggatccaaaacttanacttatgggagttcttttgcaggaaaaaggctcagctcaagaaaaagagaggtgtcccccagatcaatgagcagatgctatttcatggcaccagcagtgaatttgtggaagcaatttgcattcacaactttgactggagaatcaatggtgtgcacggngctgtctttggaaaaggaacctatttcgctagagatgctgcgtactccagtcgtttctgcaaagatgacatcaagcacgggaacacattccagattcatggggtcagcttgaa

SEQ ID NO: 1246 - DNA, 481 bp, Homo sapiens
  misc_feature (1)...(481): n = A,T,C or G
ctgaggactggattcagcatcaaaatacctcccccacattgagagctgtcggcagttaaggcaacaataccctgattggaatcctgagatcctcccatccagaagaaatgagagcaataggaaagaaaatgaaactccaagaagacgttctcattcccccagccccagacattctaggagatcaagctcaggtcacagaatccgtcgctctcgaagtccagtccgttatatctatagaccaaggagtcgaagtccaagaatttgccaccgtttcatttctaaatatagatccagatccaggtccagatccaggtcccgttctccatatcgtagtcggaatctccttagaagaagtccgaagtcctatcggtcagctagcccagagaggacatcaagaaaatcagtgagatcaggtacaccgatnntcctaatgccatcattttttttgagttttggaaatgagatattggattttaattaa

SEQ ID NO: 1247 - DNA, 429 bp, Homo sapiens
  misc_feature (1)...(429): n = A,T,C or G
gaactgaggaagcatcatgacgaagaggcattggaaacgctgacagtatcccccatctgggttccgcacccatggggcagacacatgctcatcaccagcaagatcagcttcttcattttgacaacattgcactagctgctccggaacccacactggctctgcgattctgtggaaacatgcaaacagaccctctcgcccagaccaacacgggatctggaccattccatgatcctgtaagcacatccttccatttagcataccccagattactggggctgttattagcatgtcgttcagcagcagagcgnccttccttttccaattgcaaaaaatttaaggtaaaaagagctaaggagagtcttatctttggggtatggccatagcctattccccctttttgttttattaataattcttttaaggttctaa

SEQ ID NO: 1248 - DNA, 537 bp, Homo sapiens
  misc_feature (1)...(537): n = A,T,C or G
gaactgagcaggctcctctncncatgctcctccaaggaatggtaaggtggcccttgacccacacacatatctatcaagaactcaagagcacagacntgaagtaccnggaaccgtgtgcgcagccgcatcagcnacctganggaccccangancccatgcctgaggcggantgtgctcagtggggccatttccccatagctcattgccangatgacagcggangaaatggncagtgatgagctgngggagctgaggaacgccatgactcaggaggccatccgtnagcaccantatggcgaagacaggcggcaccaccactgacctcttgcggtgtatcaagtgcaagaagaagaattgtacctataaccaggtgcanacacgcagtgccgatgagcccatgaccacttttgtcttatgcaatgaatgngggaatcgctggaagttctgctgacggaaccacccaccaggatggcagaggataaggtgaagaagacccagcaggaagcacagaccacgtgacccagagcaaaaaaaaaa

SEQ ID NO: 1249 - DNA, 220 bp, Homo sapiens
  misc_feature (1)...(220): n = A,T,C or G
ggacccaccaggtttcagctgctcccaccagctctgcaggggatggattcaaggcaaacctcgtctttaaggagattgagaagaagcttgaagaggaaggngaacagnncgtgaagaaaatcacggcggcatttttgccttgaaagtgaaagatggccctggaggcaaagaagctacctggntggtngatgtaaacaatggcaaaggatctgtgcttccc

SEQ ID NO: 1250 - DNA, 264 bp, Homo sapiens
  misc_feature (1)...(264): n = A,T,C or G
gaactgagggcttcttggtaatgcccaggctaaggcactaggaccagcctcagagcagtcagagaatgagaagaagcccaagagngnagngaagaagaaaaggtggaatcntcccaaaatgtctcttgcccanaacntttnatcgggttgcctcaanagaaggcaagcttcctcagnagctcacgganaggtcctgctngaaacctnnccgcngntttctatgnannaatttntttcatacnttttttttgggggggggggccc

SEQ ID NO: 1251 - DNA, 123 bp, Homo sapiens
  misc_feature (1)...(123): n = A,T,C or G
cagaaagaaagcttttagtaaaacancctttttaatagcctggccacgcaagaaggtgaatgtttnggctcttaagaggaanaagttcaaaaaataaattgtcttgtaatgtaaaaaaaaaaa

SEQ ID NO: 1252 - DNA, 440 bp, Homo sapiens
  misc_feature (1)...(440): n = A,T,C or G
gaactgaggaacttaagaagtatggagttaccacantagtacgagtatgtgaagcaacttacgacactactcttgtggagaaagaaggcattcatgttcttgactggccttttgatgatggtgcaccaccatccaaccagattgtcgatgactggctaagtcttgtgaagattaagtttcgtgaagaacctggttgctgtattgctgtccattgtgtcgcaggccttggcagagctccggtgcttgttgccctagcattaattgaaggtggaatgaaatatgaagatgcagtacaattcataagacaaaagcggcgtggagcttttaacagcaagcaacttttgtatctggagaagtaccgtccgaaaatgcggctccgcttcaaggattccaatggtcatagaaacaactgttgtattcaataaaactggggtgcctga

SEQ ID NO: 1253 - DNA, 389 bp, Homo sapiens
  misc_feature (1)...(389): n = A,T,C or G
catggaaaagtgccggcttccagccctttgcggcttttgcagtggatgaccgtgtggagatgctaagcggtggacagcggcagaacactaggaaacagaaggcttgggacaaagttaatagcgcctgttcacaaagttcacaaaggacccgttttcactgtgtcctacaattgggtcatgtagggctggccaggtggctcagcgtttaagaacacagttgctcttccagaaggcctgcttctattcttcctagcacccacatgggtgctcacaaccactagggtcactctgcttccaagggtttgatgttctcttntggggctntgaggactgagcaaagaggnggtgcctggttatacatacaggcaaaacattcataaaataatcag

SEQ ID NO: 1254 - DNA, 361 bp, Homo sapiens
  misc_feature (1)...(361): n = A,T,C or G
aagaaaacttcaaactccacagtcggaggagagtgacttgcattatgcggacattcatgtgctcaggcaaattcggccacactctctccacacagtgaaatgcctgcattcagaatctgctacagagtacncnncncttcnnttcccccaggccacacctcantatgacagcaacaacggaaccctggtgtgagccctcgggaagacgttccgatttctacgattttaccatcctgtgggaataacctactgttctcgagaacaaggacaatggccatgttttaatcttaaaggacaccagagcatctggaattatgggtctccctactctttccactatgaatcttttggtttgccactg

SEQ ID NO: 1255 - DNA, 137 bp, Homo sapiens
  misc_feature (1)...(137): n = A,T,C or G
aatacatttcaactgtatgaaattggtttattgttcatcanaaatgttatttgccttcacaaagtctggtttcaatgaaccagctatgtaatgggatattaaataaacatggaattttacatgttcaaaaaaaaaaa

SEQ ID NO: 1256 - DNA, 174 bp, Homo sapiens
gaactgaggtatagctccatgaataacttaaacgaccccccaaattggaatatcaggcccaatgccagggctgatgggggtgatggaagcaagtggaattatgccctattggtgccaatgctcggattggcagcatttcgttggatttggtctagggaatcccaaaaaaaaaaa

SEQ ID NO: 1257 - DNA, 188 bp, Homo sapiens
tccttctgtgtgctgcagtcttgtggcgttctgcaggccccctgccagtgaccccaggctttttatggctgtgagactcattaaaagctcaggggtgagacgtgacctttggaggtgactataactgaagattgaattacagaagccaaaaaattaaataaataaaaggtaaaattataaaaaaaaaa

SEQ ID NO: 1258 - DNA, 442 bp, Homo sapiens
  misc_feature (1)...(442): n = A,T,C or G
aggcagccatcttctcctccctcgatcatcttttccatccagatgcaagtcgtgggagctganagctcggacnagggtgagattgccgccttccctccgacccgaacgcgtgcgccccgccggccccccgctgggtgcacactcgcacgcacaccctcgcacccatacccgcacacncgggagcacacgcacaggtantcagtcacacaccaagggcagcagcgacggcggacnaaacatgctccggtggcattgcaacccccccacccccgccatccaaccttgcaattcntttgcagtcagaccccaaaccccacaccttccccggagcccccctccataaaaaantgccttccccccaaaacacacncgcacacntnacncaaanntngganaatggaccgacagaaaatntttttggcaaatgctccatcaaaagggc

SEQ ID NO: 1259 - DNA, 238 bp, Homo sapiens
gcttttagccaaaaaatcaatgaaccagtaagttgcattcgaaacggaggcatatgccagtatcggtgcattggccttaggcataagattggaacttgtggatctcctttcaaatgctgcaagtgataatagagaagacaaagatcctgcaaaccaaagaaaacaccagaattttttcctccatgaagatggacaaaacttaaaccaaattaaagtttcttgattaaatgcaaacact

SEQ ID NO: 1260 - DNA, 310 bp, Homo sapiens
  misc_feature (1)...(310): n = A,T,C or G
atgggtctcacggccaagganctgggaggcctccgatgactcttcagcaaggtgtacaaagccaagtacccattgttggctacacagcccgaangatcctcaacgaggatggcagccccaacctggacttcaagcctgaagaccagccccattttgacataaaggacgaattctgatgtctagctgagaagcagccggttctagggagaagtgaggggacaggagttaagtgtccctcggaacaagcggaggaagcctccgagtgccctgcagctgaataaagcgaatgtttaactgggaaaaaaaaaaa

SEQ ID NO: 1261 - DNA, 468 bp, Homo sapiens
ggaattcgatatcaagcttaccatgaacgagtacaagcccacggtgcgcctcgccacccgcgacgacgtccccaggggccgtacgcaccctcgccgccgcgttcgccgactaccccgccacgcgccacaccgtcgatccggaccgccacatcgagcgggtcaccgagctgctgatgcagagaattgagcagctttaaatttagatttcaatatttgagagaaatcagtaaatgttcatactcgttaactatgtcaaactttttattttataaaatatagtctgctaatatgtatattggcataagaattcccaacagcattttatgactccttgggtttaaaacctcagtattaaatttatcagtgtttgtggtgcagcacatttaagttcaacatagtccacacattttgttggaagaagttttcaaataaaaagcgcgagttggatttttcccattaaaaaaaaaa

SEQ ID NO: 1262 - DNA, 283 bp, Homo sapiens
agaccagacagtctggagtattatcttgaagtaatacattgcccgaacaatgtgcaagaagattgcaggagataatgaaaactgcttgtttcaacaggatcctaaaatgaaaaagatggtgttttgcatttttattgttagctccaaaccatggaagtttgaacttaaaatgctgaagaagcaatgcaaagatatctaatcagcattcgggacaccttgccactcttacttttcttttaactgaataaagatgcttgtaagatagtggaccaccacaaaaaaa

SEQ ID NO: 1263 - DNA, 252 bp, Homo sapiens
  misc_feature (1)...(252): n = A,T,C or G
cttcactttcagctgctgccggctgccacccttgcaccagctnaaccancagngcctgctggagtaagtactantctganntntgccgcatgcntntgnctacccacatggccatcnnggtctcnatgctgctntccaggacanacgcnnanaggnagngagctttggaatccaccccttctgtgggggaaaactacnttcaccaggantaccatggctttnccagtnccagtanaatggtggacattggcg

SEQ ID NO: 1264 - DNA, 318 bp, Homo sapiens
gctggcgtccaggtcatcaatgcttgtgaagagttctattgcctagaacatggaatctagcctgagggccagatcaaagaagaatatcatcaaggaaggatatgactcttcttcaatgagataggtactaacagtccagtacaatagcaaacaccaaccatgaatcagtagcagtggcaagatccagcagaaacagcaagactccatcgaatcggcacaagtcaacggaagacgccagaatcagctggaatatcataagttctctggcacatttctctctgtgaagtgaagaccaataaaaagatcagtgaagaccgg

SEQ ID NO: 1265 - DNA, 411 bp, Homo sapiens
  misc_feature (1)...(411): n = A,T,C or G
agctgatttatccagagcccagcatgggtttcctgactgccgtgactcaaggcctggtgcggggagctgacaggatgagcaagtggacaagcaagcggggaccacgcaccttcactaagagtcggggtgccaagaaaacaggcatctatacttctgataggaagtttgtgcaaataaaagaaatggttccagaatttgtcgtcccggacttgacgggcttcaagctcaagccctacgttaattaccgagctcctgcaggcatagacacacctctgaccgccaaagcgctcttccaggaaacagttgcacccgctatcgaaaaagactttaaagaagggacatttgatgctaacaacctggagaaatccggtttnaanccacacaggaaggcaagctggtccaatatatcct

SEQ ID NO: 1266 - DNA, 579 bp, Homo sapiens
  misc_feature (1)...(579): n = A,T,C or G
gactgcatttacccacatggcagccctgttcccaccaccgcctggtcccagatttgtcctccgaggcacacagtcggctgtgaacacgctccatttctgcccaccatcccaagctgcagggaacccacttctcttctcagggtctcagaatggcctagtacatatctggagcctacaaacaagaagaatagttaccactctaaatggccatgggggccagggtgtaatctggctgaagacactgccacagggacaccagctcctcaggcagggtcganacctgcggctgtgcctgnnggacctggagganggcaggaacaccatcatggactcanntnagntggacagtgtgggcttatgcaggggctccatcctggtcaggggacagcagtgctggatgcttgctgtgccanggaagggcagcgacgaagtgccacctgcgttaganatgaanggccaagaagctgagtgacctncaaagaggaagactacttgntncatggcttnaggntggntcatccnctgaancctcagagnggcatcttngtgtgtctgtggcttgggctgaactaataacca

SEQ ID NO: 1267 - DNA, 236 bp, Homo sapiens
cctgagagcaggttgttgccctggatgcccagaatatcgtaagctgttgcgtgtggagaagctcacacgttagcgctgaatgacaagggccaggtgtatgcttggggtctcgactctgacggacagcttggcctacagggatcagaggaatgtatcagagtacccaggtaacaaaggtgaccgcacagaggtccttaagcttctataataaatttatctatctaaatcaaaaaaaa

SEQ ID NO: 1268 - DNA, 375 bp, Homo sapiens
  misc_feature (1)...(375): n = A,T,C or G
aactgagatgcctgccttcgatgtcaagctgaaaacaaagcaagaggactgtgttgtggtctggggagagtgtaaccattccttccacaactgctgcatgtccctgtgggtgaaacagaacaatcgctgccctctgtgccagcaggactgggtagtccaaagaatcggcaaatgagaggtggcccaggcgctcctggtgtggttgctgaccctggacaaagactaaacactgcaggggattcatccttgagagagagaggatgctgtgcgcctttgagactcaccaaaggcttgctttattaatttgtctgtttagttttgggaaattctctacaattaaaataatttgntaaaaatggcctttcctaccttggg

SEQ ID NO: 1269 - DNA, 404 bp, Homo sapiens
  misc_feature (1)...(404): n = A,T,C or G
actgagaaaggcccgtgagagctgaactctgannactgaagttctaagaagccggaccgatgtgcacagagaaggaatgaaggaagtatggatgtgaaggaacgcangccttactgctccttgaccaagagcagacgggaaaaggaaaggcgctatacaaactcgtccgcggacaatgaggagtgtagggtccccacgcagaagtcctatagttccagngaaaccttgaaagctttcgatcatgattcttcacggntgctttatggaaacagagtaaaggatttggtccacagagaagccgacgagtatactanacaaggacngaattttaccctaaggcagttaggagtgtgtgaatccgcaactcnaagaggagtggcnttctgtgcggaaatggggcttcc

SEQ ID NO: 1270 - DNA, 314 bp, Homo sapiens
  misc_feature (1)...(314): n = A,T,C or G
ctgaacgagtgacttcactaggcaaggactggcatcgtccctgcctgaagtgtgagaaatgtggaaagacactgacctctgggggtcatgctgagcatgaaggcaagccctactgcaatcatccctgctactccgccatgtttgggcccaaaggctttgggcgaggtggagctganagccacactttcaagtagaccgaggttgtggaaactctccctgcccgcccaggcacatgccaggccttacccctggacagcagggctctcgggaaccctcagtgcctttaataaacctgatctttggaaaaaaaaaaa

SEQ ID NO: 1271 - DNA, 336 bp, Homo sapiens
  misc_feature (1)...(336): n = A,T,C or G
gactgaggagggcccgtgtagccattacgaggggtgggccaaccttctgntttgtatggtatgccaagggagaccgtatgcttcggaatgctcaaggctaaggcccaggccctggtgcagtacctggaggaacccctcacccaagtagcagcatcataacagcgtgagatgccaggacttggaaggtgccattncnagggtggncaaccttntgntatntntgtatgccanggagaccgtaagcttctaatgctctnggctaacgcccatgccctggtgcantacctggaggaacccctcacccaagtagcancatcataacagcgtgagatgcca

SEQ ID NO: 1272 - DNA, 280 bp, Homo sapiens
  misc_feature (1)...(280): n = A,T,C or G
caccccctggccttgacaaccctgtcctggntctnacctngcaatgntnnngccctaagacgccttcacctatggnccctctttggnnccggacgggacntggactaacctggcccnggtgttcttncctttttgaagancttaaancctaggancccttngtctgtcacaccaggcctggggctgggggacagaaccggagcacacaccccctacanctgtcangngggggatggaacctggggacctttccttttccataccatggggccaggatatg

SEQ ID NO: 1273 - DNA, 329 bp, Homo sapiens
  misc_feature (1)...(329): n = A,T,C or G
actgagatgtttcaaaccttggttcaaaaagtctgggtccccatgaaaccctnctatacccaggtttaccaggaannntgggnaggagtggggttaatgagcctcatcgtatataaaatcangagngctgataaaagaagtnaagctttgaaaggtcctgcaccttgcccatggccatcactaactgctccgaatccacaagatgaagacgtcggctaaacttgagcaagctttgttagatgggaacatggaacatcactgtacacttatctaagtaccatttataatggtggcattaataaatgtatctgtgaataccaaaaaaaaaa

SEQ ID NO: 1274 - DNA, 374 bp, Homo sapiens
  misc_feature (1)...(374): n = A,T,C or G
gactgagggatccggcactgggacgcagcttctaaaagtccaggagctctttcgagccaactcaacaaactaggaatcacagatcttacaagctgagttctggctgctccagttggaagcccacatgccaaactgctctggagtcgccggaggcatcagcagatcccagccgagccttgagagaggactgtgatctgccttacgggtcacctcactcaggactcagcgctcgcacgttgcagcagctccagaccccactgntaccggaaagttacaggtaccggaaccgagaagaccaagcgcggcccaggaaccgcggaggaaaacttcccaggatggnctcccactcaaagctgaggaagctcttctgttca

SEQ ID NO: 1275 - DNA, 396 bp, Homo sapiens
  misc_feature (1)...(396): n = A,T,C or G
gcgatccggagcatctgaaaaaggaactggatgagttagtcggtgccattgaagaacattttttccagccacaaaaatataacctacagccaaaagcagaataaaacattccagtactggataggattaaatttacctccaataaactgaacttgattgttaaagcaataatattttagggccaagtgattcagataatcaccacaagtatttacatattttcaacagctctatcttccttgtgattttttttttaattattattatttttagcctgaaaagngaataaaaaagcttggccaaacccaacaaactaacatctntatgaaaatgttaaatctgggcattatntgnantttttnaattaagnatttaattttctaaaaagtaaatggg

SEQ ID NO: 1276 - DNA, 115 bp, Homo sapiens
  misc_feature (1)...(115): n = A,T,C or G
cgatccccagtctttagtccccactctgctttgggatagtatgancttcgtttnggacncggngtgactttgtccanttacaaacccaataaacaatagagtggaaaaaaaaaaa

SEQ ID NO: 1277 - DNA, 427 bp, Homo sapiens
  misc_feature (1)...(427): n = A,T,C or G
aggcccacaaggggaagacatgccatctgccaagcagctagccgatatcggctacaagaccttctctgcctcgatgatgctcctcactgtgtatgggggttacctctgcagtgtacgagcctaccgttacctccagctgcgcagtgccaggcgccaggctgcagaagagcagaagacctcaggagtcctgtagagcagcgaggcgtgaggcctgcggcctgaaatggaaaagattttcctgcatgtcaaccctggcaagaactaggcccccatgcctttcaaacctgctgggctaaaatgccttggtttctgtagtgctactagcttgagccgttnctgacagtttatggaggccatcaagtaaatgggaatgtgagggtgaggtttattacagagattaaatattttgctttgttaaaaaaaaaaa

SEQ ID NO: 1278 - DNA, 362 bp, Homo sapiens
  misc_feature (1)...(362): n = A,T,C or G
tgagctttgacagaggaactggaatccgtagccagtgagcttcatgccattgacatccagattcaggaactcacagagaggcgggcaagagctccttcagagaaagtcagtcctgacagggaaaatcaaacagtacttggaggactcttcggctgaggcgagcagcgacttggacacatcaccagctgcttggaataaagaaggtttgccactctcctgccttgccatngncgtaatcaagaatgaaatcactctgtggatcagtgtgtaccgggagataaagctggcatggggaacttgcaggcagatattctttattcatgtgctataatattttacatgtaaacttggaaaaaaaaaaa

SEQ ID NO: 1279 - DNA, 330 bp, Homo sapiens
tgttcgaagccctaagaagacaaaggtttatgaagaatacagcttatgtctctacataatattgaccctctgaattcatcagaagatattctgaagcctgaaacataagataaaaaccagtggccgtttgttctactagtcaacaaagactagtatctttccgttctaagttcatcattgaatgagattgttcttctgattagagtagaaaactgaaggttcatgattatctaggtaagatacacacaagaattttggcccacataaacaaatgatttgagctaaagagtttgaaagtataaatttagatttctgcatgaataaaaaaaa

SEQ ID NO: 1280 - DNA, 535 bp, Homo sapiens
actgagctgctgccggtgtgatgagctgagactttaagagaatctggcggccgcctgggctgcggccctgagagtcaggtggctgcaaaggacaacccgcggtgtggtgccacaggaggcaccgagagccttccacatgaccaaggccatgttgccagggacatatcctaggaccccagaagaacgggccgcagccaccaagaagtgtaatatgcgtgtggaagactccgagccattcccagatgatggcatcgggtaatggtgactacccgatgcttccccaaccgatcgcagcatgagagggatccgtggtatgatgggaccacccagacctcaggctgacctagggtgaaccgatacactgggacctagacatttacgtcaggatcaggagtcgtgtggacacgtcgcctacacctgcttcctgagatgatgtcatgtgtaaacactgcttcggcttcgtggctttcatggttttcatgttctgggtaagggacatgttcccttcttaaagcagtacccttacaataatccg

SEQ ID NO: 1281 - DNA, 244 bp, Homo sapiens
gcttcgttacgacgatgaggtaaagcgggtacgtggctgaaccagtggagctggcacaagaattccgcaagtttgacctgaacagcccctgggaggctttccctgcctatcgccagcctcctgagagtctcaagctcgaagctggagacaagaagcctgaaaccaagtaacttcaaaagcatgtagatcctagaggaaaaggcctcacctaaggttgtctgtaaataaactccaatggacattc

SEQ ID NO: 1282 - DNA, 439 bp, Homo sapiens
gagcacccatgttctccagactgttggaagacaggcagccccaccaccagctcacacattctgtgcacaagtgcttccctgactgtcttcgctgagcaatgaaactgcaatgacgctctacacttggacctgaactctgtgtgcctttttgtccaagcacagggtctgtgttacaccagcatattcttacctatgtggaggcacaggtatgccaatgctgctggtcttatgttgaaacatgtaaaggtactggtttggttttcattctcatttaggaaaatgtgatctaaagtcagctaatagatccaaacagcacaaatggacttttcttttcaagatggacttggatggtattgtaaatatcatagtcatatgatcagctccagctgacatctgagtgaccttctaaagtcagcctgcaggattttccaagcatgct

SEQ ID NO: 1283 - DNA, 107 bp, Homo sapiens
  misc_feature (1)...(107): n = A,T,C or G
tgggctccatcgccancactgtnngaaacaaaaaccaaaccccgaaatgctnacttattcatcaaggggagtttgaccaatgctttgggggccttcaaaaaaaaaaa

SEQ ID NO: 1284 - DNA, 256 bp, Homo sapiens
  misc_feature (1)...(256): n = A,T,C or G
gctttagcaaaacaatcaacaatccagtaagttgctgtatgattggaggcatatgcaggtatctgtgcaagggcaacattcttcagaatggcaattgtggagttactagtctcaactgctgcaagagaaaatagagaagaagtcaaagatncagtgaaccnaagaaaacaatttgcacctccatgaagatgaaccaaacataaactaaattaaagttccttgattaaatgcaaacgcatgttggtaaaaaaaaaaa

SEQ ID NO: 1285 - DNA, 135 bp, Homo sapiens
  misc_feature (1)...(135): n = A,T,C or G
cagaatggctgatacctgcaaaatgaaatactnagtgtnggacagccctttgnggaanatggagctgtctggctgtgagcgaggnctgcatgggatacggntgctcactgggaanaccccaaacactgactccgc

SEQ ID NO: 1286 - DNA, 186 bp, Homo sapiens
  misc_feature (1)...(186): n = A,T,C or G
acgtcagttcacaatgccagncctggaantgagttactgcanaggaaaaaaccacacatagcctatgagagcagtgagggggtggagagaanaggtggatgtcccccttacttcnaacatgcttttgacacacaccaacttnngngnttngatctggtgcaaattaaaagaccaatgtgagatatg

SEQ ID NO: 1287 - DNA, 335 bp, Homo sapiens
  misc_feature (1)...(335): n = A,T,C or G
gacatagtctgtggtgagttggaagaaggtgaactggaagacgacggggctgaggaggtccaggacccccctggaggacaagagaggagtcggaaggagaagggggagaagcaccacagcgactctgaggaggagaagtctcaccggaggctgaancggaagcggaagaaggagcgggagaaggaaaagaggcgctcgaaaaaaaggcggaaatctaagcncaaacgcnntgcttcctccagcgatgacttctcgngacttctcanatgactcanatttcanccccagtgagaanagtcccgcaagtaccgggactntagtcccccatacgcacc

SEQ ID NO: 1288 - DNA, 144 bp, Homo sapiens
  misc_feature (1)...(144): n = A,T,C or G
tcttgaagcccagaacatgatnaagggttgttcgggctccttgaatataactctacaatcgagcttcatggtgcaaggcacgagtgatcgggtntcgtccanaagggtgaacctaatgaagtaaatncccttgtgcccattacg

SEQ ID NO: 1289 - DNA, 138 bp, Homo sapiens
  misc_feature (1)...(138): n = A,T,C or G
ttaaatgagagactcacnganctgcactttccgcaaaagncccnaatgngggccccgtaccctctgtacccagcgganataggngcctgctcttnctcctcctgccgctttcacctacccngcttcactggatgccca

SEQ ID NO: 1290 - DNA, 480 bp, Homo sapiens
  misc_feature (1)...(480): n = A,T,C or G
gactgagcttagggcngtctaagaataatgctatnataaacagccgaccttantgcaaagatattggcgtttccaagacaacaagatacaagatatatgctttggagncctaggagaatcttggattcaaagacctgtannggncaggtactacagtgaaggtcaagagnttgcagcaagangactcattnatagaaggagtgancgaccaangccttgtggctgtggtgntcagcttgncgntgaccgntactntcctgtatgcacttntcagaaatgtncnncntgaacatncatccataaaaccangagctaggcngagtgcttcnagaacaatnccnaacagaacaggatgtgnctgctcctgcccgacagcagtatctacactgaaatgnnctgtccaatctgcttacatcaagcctcctttcctngttgaaacaaactgtggacatctcttttgtgggtctgctaattgcatac

SEQ ID NO: 1291 - DNA, 219 bp, Homo sapiens
  misc_feature (1)...(219): n = A,T,C or G
tcactaccgcgtgttccacaccattagtcanngagggctcactctaggacacaagctancctaggactgctngaggnccctncagcaagacgannggtgcttnnganaattttntccccatgtgnggntgaatangctggaannncacttttatcaccatctgacccattaggaccttgnnaacatagaattaaaagcgantaatctggaaatctcaca

SEQ ID NO: 1292 - DNA, 152 bp, Homo sapiens
  misc_feature (1)...(152): n = A,T,C or G
cttatatattgatgccaaaataggancatggtgngncngacnncnaagggcanctctggaggcaacccctatgccatgcgttggaaacancaccggngcctctggnaagaanccgggnagaggaaccatggangaggatcctatggatgtct

SEQ ID NO: 1293 - DNA, 201 bp, Homo sapiens
  misc_feature (1)...(201): n = A,T,C or G
actgagggaactgcagcaacaaggaatgcctgttcctgcacttgaagccagttctcaagctccaggactgcccgtggtataaccaagggttctgcaaggaaggtcccctgtgtaaataccgccatgttcatcaagtactgtgtnccaactacttcaccggcttctgccccgagggacctcagtgccaatttgggcaccata

SEQ ID NO: 1294 - DNA, 219 bp, Homo sapiens
  misc_feature (1)...(219): n = A,T,C or G
gggggcggaaagcgaaaaccactccaggntntnnctttgctttgcgttcnctggatccacccccacgcctggtaaggnccaagcaaccatggcaggnactagagggagagtaaggctatagaagccaatggagggaggggactcatggaaagntggcccaaacccaacctgaccccacactggcaccttgctagcccaataataaacattttgctgatc

SEQ ID NO: 1295 - DNA, 289 bp, Homo sapiens
  misc_feature (1)...(289): n = A,T,C or G
gaggactttggaaatcctaaatggccnagctactgcaatctccacccaggttccttcctgaggagtggtatattgctaacaaaagccagtaccanagagcaagaggncccataaggtccctgnnnctagaacgcttggttggcannagagccagaaggcttngtngngaagaaattgagaagaccaccaggaagtctnagtagcgacgtgaacaangaaactttgngncagagactntgagngagggtcaagngttctcgggaagnaagcnnttacaatgacaaaactt

SEQ ID NO: 1296 - DNA, 138 bp, Homo sapiens
  misc_feature (1)...(138): n = A,T,C or G
gccataattacttcttgtggaactctcngaggtcggacnggagangtgacatggntccttanattnacatgtgcttacggagaaacnggnggtgcgtctgaanagcccagaacacagtctcggagagtctggcccccg

SEQ ID NO: 1297 - DNA, 129 bp, Homo sapiens
taagcctgggtggcaaccttcaggtggcactggaaactacctggttcctggacatgcccagtagaaggcggggtcccagtcggcagcagctaaggtaagggatattaaatgtatccataaacaaaaaaa

SEQ ID NO: 1298 - DNA, 223 bp, Homo sapiens
  misc_feature (1)...(223): n = A,T,C or G
actgaggtaacattcaggaatcctgggntgatgatacatcagccttcgtttctctcagccagccagaacaagtacaaattggttagtgtcctagacatatgttttgtttgttaatgaggtgggggtggtcacctttatgacagctgtggtttcaggcagctagctggctcacttagcatttctgcttgttttatttttagcttgctagttaaataaagaaaaa

SEQ ID NO: 1299 - DNA, 482 bp, Homo sapiens
  misc_feature (1)...(482): n = A,T,C or G
gactgagggttttgcggcctccaggtggtgggtccaatttttcattaggctttgatgagccagcagaacagcctgtgaggaagaacaagatggcttctaacatctttgggacaccggaagagaaccccccatcttgggccaagtcagcaggttccaagtctagtggtggcagggaagattcggagtcgcctggaacacagagaagtaactcttctgaagcaagctctggagatttcttagacctcaagggagaaggtgatatgcatgaaaatgtggacacagacttccaagccaacctggcgcagatggaggagaagccagtgcccgctgctcctgtgcccagcccagtggcttcagccccagtgccatncaggagaaacccccctggcggcaagtccagcctggtcttgggttagcttcttgngttggaactctgnccttttgnctgnctggttggtggcccatgcttgggaactgcacag

SEQ ID NO: 1300 - DNA, 379 bp, Homo sapiens
ctgagttacaggatgttagatccggtacagaagagaatgaggaaaagctacttatcagaggaaagatcaccgatcactggacaaatcgtaaccaggctctggacctgcaacattccaacctctccacacagcgcggtggctctgattggcccttcaacctttacaaacacagctgctttctaggaatgccctcccacactagcaattccatcgccctacgagctaagatctggcatcttcgagtgccatgcaagcagagattcaaagtcaatgtctcaaaactaaatcactttttctttatcttgagacacacattctttttcctttgtttgacaataaattaggatgctttgttttttggctttttcaaaaaaaaaaa

SEQ ID NO: 1301 - DNA, 487 bp, Homo sapiens
gactgagcatgaccctgcctctccttacccgccatgatggatcagccagctcagtaagcctgctcacacctctttgtcctgacctggaaggaaagaaagactcgatgagcatgaggatcagcacaccgtctgcctcagctccctcccgctcccgctgtgtttctccatctctgaggcatggcatgctcccatccatccccactgcgggaatgaacccacgtgcagcagctcttcaccccggggagtccgcatcggccacgtccttctagctgtttaaaagtcaactagccacaatctggagtcgcctgggaagagagccccaactgacattgcctaggtcaggctggtctatgggtgtgtctgtgagggactgactgttgatccatatgggaagacccagaccaccattccctgggcaggtgaccctggactatgtaagtgaagaaaacttgctgaacataggtggtaagcaagcagtgcctccaca

SEQ ID NO: 1302 - DNA, 458 bp, Homo sapiens
  misc_feature (1)...(458): n = A,T,C or G
ccgtaccggaagcatgaagccagaggngccatgcagaggnccctgctgaagctccaagctcactgagctgttagagcgcctgcanagagacagggangatntgggtttttttggaaaccttatntttccactccttttagcagngatcangctgataccttgncagatcttctgcctgcncaagtgtctgcagccgtgtgactgnntgtacncaaactaggacctgnccagacgncagtgangatnagtnnnntgnacttgctgccttngcctgancaangctatnacactgaggctggtcactctgaaggccttcaagctgagccgcattcacttgggagcagcttctacggtgtaangataggatnatctgctccacgcacggggtcattgcaggngaagcacttggtgcaggnggcgaaatccactatactggtngacaaatgtgatctaactac

SEQ ID NO: 1303 - DNA, 174 bp, Homo sapiens
gagcagcacctggaatgcatagagaaccaggttccctttggaaaatattcactcgcttccaccagcccaaacccgaaggtaccatcagtacgtgaggcctacaacagggttctctgttttcctgtagccagcctctctgatgctcccaacaatgtatttgaaaagcaccttgat

SEQ ID NO: 1304 - DNA, 196 bp, Homo sapiens
  misc_feature (1)...(196): n = A,T,C or G
gactgagaaaaattttaagtgcctccttatgccaaggaagggccaggttttggatgacttcaactaacagtagagattgctgtcctagggactaagnntacacacatgaataaangacggaaattccagttaaaaggnaaaggagnncgtggggcctantcnccnnggtcangncncaaggactaagtatcgacgc

SEQ ID NO: 1305 - DNA, 548 bp, Homo sapiens
gactgaggtattgtccagggctttctcacagctcctaaagacggacctcagacgtgcatcacgtggacctctgaaaaaaccatggagctcattgctccaaagccaactggagagcttctcccaatcctgctgctgctgctgttacagctgcttacaacagccattgtcgtggctagagtcttatattcactgtgacaccataggagaaatgattccacttttgctgtcttacatgacctaataaaaggaggcacatcccattatactctcaaaccctgtctgcactcagggagaggttataacctcattaaggatctttggagccattttttaggtcttggcaaccatggttcttgaatgggtaactgctggcagaacatgaaatccttcctaaactgattgtccacttttttctttgacattctcttgagaacagccactagtttctcagtgtgcttagcaaatatgaatttacaatataaatcaatatggacattcatgtttcacagacttcaaaattacatctatgagcatattttggcacatag

SEQ ID NO: 1306 - DNA, 208 bp, Homo sapiens
  misc_feature (1)...(208): n = A,T,C or G
tcagctggcatcaatcaggatcccatccctgagaggactgcatcaactcttttggaaactgtcttcccaccttgatgccctgcgctgtgcagcttctgaaaatgacanacagggaacggtcaccctggccatgganantgnaangctnggataactagangattttcttggaacagatangncctttccctagtgccatagaaaacaa

SEQ ID NO: 1307 - DNA, 104 bp, Homo sapiens
gcacacgccattcacgctgctcaagggcaggtcggcaccagtatcaggggcttcggcacctgcaggaatgtcaaattaaacatctgttaatagtaaaaaaaaaa

SEQ ID NO: 1308 - DNA, 239 bp, Homo sapiens
  misc_feature (1)...(239): n = A,T,C or G
ctagacgatcactctncncagagtgactctcgncgaaaacngacagaaatggctncnggatgagatggactctgactggcgaancacctttgagcttgtnacctagcagctggggccagtgagaggngactnaaacnctcntgcctcaggntcttanaacagnagtggcnattgangctnacanaataacatgcctnttgggcaaggatgatnggnctcctggctaatgttcaatctag

SEQ ID NO: 1309 - DNA, 539 bp, Homo sapiens
  misc_feature (1)...(539): n = A,T,C or G
tgaggtagaagccctcattcttcatctacccttttttcagtatctggcaccaattctggccccatcatttgtggcccatggctcttgtggtatgccgaagatttacaggcagtttctgtggaacatttccctgtccacctctaatgaagccccgtcaaacaagaacatgtgattttgctctgactgccaagaagatcagcacagactccagaatgtcagccgctctcaagctattagaacctttaaagtacaaagcaccttgtaatcctgcttaccgtgcagcccaaagcgtggcccattggcacatgggaaacatcacgccacacgggggacagacgctccctgaatgtaatagctcctgccatcttgccagaaaagtgaagaacgttggtggtaccacccttcctcggagaaccttcacagccagcagtgcccacctgggtttggagttcaacaaagcttctacccttaatgccagcacactgcatncagactcatccagtgctggaggaggtgaagaggatgtagagggctttgat

SEQ ID NO: 1310 - DNA, 181 bp, Homo sapiens
  misc_feature (1)...(181): n = A,T,C or G
actgaggtctttggatgcagcccagggncgcaccaaatcatgaagatctgccttaatctactgcgtcagtgctcggactaaaagactgtgccaacacacnannctatcatgaaactttttttgtcnggngacaggatctngatagaacaggctggccctcaactgggttggctagtagagg

SEQ ID NO: 1311 - DNA, 203 bp, Homo sapiens
  misc_feature (1)...(203): n = A,T,C or G
cctatgtgagaagctcngagggtgangcaccgtttcgaactctgcagtgtgcaatgaagacgaggaagttccagcatggcctcgggggatgttggctaagggacagagcccgaaagagtccttcacagagaccacatatttatctccctggatgctttataggccttaataaaaaaatatcaaaatagtctataaaaaaaaaa

SEQ ID NO: 1312 - DNA, 238 bp, Homo sapiens
  misc_feature (1)...(238): n = A,T,C or G
tgcctccatcacttgcaaagaaattgttcccatggtgntacttgncattctatttcccaattactctaccgccctcctacttggcatgtgnttgcccagntcacaggagatggactatttattaaaantcctgaatcagagaaatagggatctcaccagcttgntgccaggaggaagggaancatgtctcaccanaacacagctacatcgcctaantcaggatgaaaactttatttta

SEQ ID NO: 1313 - DNA, 133 bp, Homo sapiens
ggaggctgatttttctttgcactggacaccaccctgttagttcctttgggcaatggggaagtcctgtctgcgggctggatcttctaaaagcaaaagtattaaatgtttaagagttttcctttaaaaaaaaaaa

SEQ ID NO: 1314 - DNA, 292 bp, Homo sapiens
  misc_feature (1)...(292): n = A,T,C or G
ggccatggctgggcttgnacttcctcctgcagtccgggangatcctcttncctcagccctcaaggnagctgngacgataggccngacctaccatgccagcctgattcccgtgaaactttgngaaccaaanacttntgctctnataangagcttaacanttcttnctgtncaaancttgggctanaaatggngtngtggttgangactatgncaaagaatctcaggcccnaggatgtcatcgaggaatacttcaagtgcaagaaataaataaattttggctgaaaaaaaaaaa

SEQ ID NO: 1315 - DNA, 496 bp, Homo sapiens
ctgagccccaccccagacaactccttcatgggcttcgtgtccgaggagctcaatgagaccgagaagcagctcatcaaagatggcaaggccagcaacatggcggtggtgtacggcaaggaggcgagtatctggaaggtgagccccagcaagcccactgccaaccacaccggctccaatgcgggccatacccacaacacttgctgagtgtgtgtcacacccacgccagtaccagacacattcactgtaccttctgtgccttcacaaggacaggccacagccccttctgacacaagccgtgtccaccgcactgccaccaccacccaagcataggccacagccacacagatcatctgcatgccagcgctggacacgcctaccgcacctggttctggtgctgatcacccccataaccaggaaggctccagccacacaatgacagggcttacctagccaaggccatgcctctgcagtccatgcctgaagctgcaggcacagg

SEQ ID NO: 1316 - DNA, 172 bp, Homo sapiens
  misc_feature (1)...(172): n = A,T,C or G
gactgaggtgggtttggnctgagtatacctgngcaggagccataattacttcttgtggaactctcaaangccaggacaggnggcctgggcttggctccatancncnatggcactnnaaggtcacnactttggctcgngaattcccnagtgatggggaatatatttaaaaaaa

SEQ ID NO: 1317 - DNA, 162 bp, Homo sapiens
  misc_feature (1)...(162): n = A,T,C or G
gactgagtcccagaaatcctggntaggagggcactttgaccaaggagggagtgtgtatatattataccaagctccaaagaccctcacagatgtcttccaggatgtcagatttgtcagcaacttgtcagatgtttctgtggtcgtttggtcaagaaaaaaaaa

SEQ ID NO: 1318 - DNA, 163 bp, Homo sapiens
  misc_feature (1)...(163): n = A,T,C or G
gcaccaaacttgagacgagggattgttcctggcctctagccctcctcacacccagttttatttattggtttggctcttgctctgagaggtctaatctcctctcaattcttcctaaactgggctgcatgctgnctgagcacaggaaagatagcaggaatggaag

SEQ ID NO: 1319 - DNA, 189 bp, Homo sapiens
tgaggacccccacggcacgagtattctgtggccagggccaccgcctcaccctcctctgcagtctctgtcacataggcatccatggaggggctgtccaaggcttctacataactccagaattggaagatggtgaactgctcccccgggcctggttggggcctcctgggcagcttctgtaagaaaaaaaaa

SEQ ID NO: 1320 - DNA, 124 bp, Homo sapiens
  misc_feature (1)...(124): n = A,T,C or G
agtttgacaaccaaaatgagnacagactttaccnatatacatcgaggatgaagagacttgctcccagtagagaaccactggtcttgntctttaagagtctgttctgactttcctaggaccactt

SEQ ID NO: 1321 - DNA, 229 bp, Homo sapiens
  misc_feature (1)...(229): n = A,T,C or G
tgaggtggggtctttcaagtgcaaggcctggtgtgtacaacaggatctcttagaaagaagcacagctgttttcctgcagtngcggccccggaaccacacgaccggcagctccagccccagaccacagctcgctggattttcagaagttccttgggccagaagtgccagccagatcactctttctctcaggtcacatatggtacataaatcactttgcaaaagaaaaaaa

SEQ ID NO: 1322 - DNA, 190 bp, Homo sapiens
  misc_feature (1)...(190): n = A,T,C or G
ataagcagatcctggtgatgtgtgntcattactgagagattcctctcccacccacacaaactgtatntacagggtggggacctgctggncacaggcatgccaatactgtctgaagactngtatttgcatganaccnttgacactgatcacctctcanctcaggcctgactccaaccacagggaggagatg

SEQ ID NO: 1323 - DNA, 331 bp, Homo sapiens
  misc_feature (1)...(331): n = A,T,C or G
gactgagacttggagcaagacttctttacagcccaacactgaggttcccaggtacgagncacaaggaagccatgtgattnctgngtcgcccagaggctctgcagcccctgcccctcctctccaccgagctcccttcacaggattgcacctctgccagccaggaggctggagtgtagatgctctatgaggtggctgtgccagaagagccacgccaaggccatcttggagactgaaaggagnnngnttggcccacactctatccctgcccacgcacctttggccatgaactccgtgacaataaagatgggctcctgagagaccaaaaaaaaaa

SEQ ID NO: 1324 - DNA, 239 bp, Homo sapiens
  misc_feature (1)...(239): n = A,T,C or G
gttccataatgggagtggtgagcngggcccccctactgtcaccccgaggagcagtatacactcggggcaacggccctgcggtccgtcatcatctttgctggcttccagacagctccgattcagacgtggaggaagtgaccatggaagananncccgtcatctcccgacctccccagacgaatctggcaaacctacgcaggggctggttagcctccccaggacccgggatcagtcaagaa

SEQ ID NO: 1325 - DNA, 112 bp, Homo sapiens
  misc_feature (1)...(112): n = A,T,C or G
aactgagagaccctgggagaaggtcaacaacaagaatganttgagtnnttgnnnaatacccnncagggnngtgttacacacttnaagggcgtgggtcttgtgcttctcactg

SEQ ID NO: 1326 - DNA, 113 bp, Homo sapiens
  misc_feature (1)...(113): n = A,T,C or G
agttaataaggggggngctggcggacaccctcagcctgacngtgcattgatcccgactttgtcagatggactttnaagacctatttcaatgaaatggttgagaataaaaaaaa

SEQ ID NO: 1327 - DNA, 617 bp, Homo sapiens
  misc_feature (1)...(617): n = A,T,C or G
ctccctggacacctcaaggaagatggttcttcatctagaaggccttccatcaatagccaggtagcctgagctacatgacaagatcccgactcaagacaaacagacctcatatctagtcatcataattattgtttatttagacttgctccctcctccctctgatttcccaggagcctgtgggtatcctcagtctctgagaaaataacagccagcatctggtacaggggctctcggtgcttctccagtgaggcaggaacagataaatgagaaaaggaaggaatcaggttgaaggcttccgctgccatcttggatgaagagggatccagaatccagcctggaggtcatgtgatgctctcgacatttccaaagtgcctcttgttgcttctcaccacaaccaagagatgcacaaggaaaggaagcccataccctgtagtttgcaagcccccagtgtgccgggagggacctgctcaaggtcagagaggagcagagaggctggaaagccctgactccctgggctaagcctgggttcattctacttncttcaccagcttcgagtgcccctggaaacacctggcacgacaatcgggaaataaaagaactncatggcttaaaaaaaa

SEQ ID NO: 1328 - DNA, 182 bp, Homo sapiens
  misc_feature (1)...(182): n = A,T,C or G
gactgaggtgggtttgggctgaggnaaacctggncagcagncataannacttcttgaggaactctcaaaggncgnacnnnaggcaggnanctactgctgctcacccnttgagagacttacccggtgcttgcctgaactgcaataaaggactcatattattgagcaggacttaaaaaaaaaaa

SEQ ID NO: 1329 - DNA, 221 bp, Homo sapiens
  misc_feature (1)...(221): n = A,T,C or G
actgaggcccaaggaagcctctcctctcctgtttccagngtgatcaatcaccaatacaaaggagttcatgtgacagctgggccacttttaatatgaagcacttattgaattatanannaaacatnccgttctgnntgctcagcgtccaggacccccgagggaaggcaccatctccacagaaggnccaacatctttgtagaagaaaagccaactggggacag

SEQ ID NO: 1330 - DNA, 126 bp, Homo sapiens
  misc_feature (1)...(126): n = A,T,C or G
tggccttgaatttacagagatccacctgcctccttctctagagtgctgggattgaagcaccactctggctaattacttctttgtaaataaactngcacaaacgtcaccaccacacacaaaaaaaaa

SEQ ID NO: 1331 - DNA, 190 bp, Homo sapiens
  misc_feature (1)...(190): n = A,T,C or G
ggtgagaagaggagtttgaagtgtttactctggactatgaactgtgttgnactgggatctaggattcaagtgctaaatgcacagtccatccttgctttctttggatattttgctcaagnatgtatgtgttgggtttgagnacttatattgtagagtatgtcaaataaatattgatttaccaaaaaaaaaa

SEQ ID NO: 1332 - DNA, 192 bp, Homo sapiens
  misc_feature (1)...(192): n = A,T,C or G
agactgagtcctggtacctgntgtngccgngttgccttccctccctncttntcanngggggantcccagggngaccgnnccagcctgcatttttggtggaaaattagatggagtgagaagccccctgcggactcccagctggatggaaaagacaggaggagaaaaggacaaagacaaacaggaaaaaaaaaa

SEQ ID NO: 1333 - DNA, 107 bp, Homo sapiens
  misc_feature (1)...(107): n = A,T,C or G
cccattatgggctccactatgttggncgacacctctgnctcctgcaggagatatcgggngnggcccngagcctctgtcnttaaactacctcatgcttttaacatcaa

SEQ ID NO: 1334 - DNA, 401 bp, Homo sapiens
  misc_feature (1)...(401): n = A,T,C or G
gactgaggcttgcactccccgggggntctgcctctgcntctcttgccttcgctgttgtttccctctctgtccagctcccctcccgntctcgccctggagaatggctcaaaaggagaacgcctacccgtggccctacggctcaaagacggtaaggtcctggccacattccccgccccacgtcccccggaagaagagtccatgaagatagaggctggccttgcaaatggccggactctaagcgtntncgacgtgtgggcctcaagaatttgcttgcaaaactcagtctgatcacttgcagtcttaccgtagcagatgttgccaacctgaatctgagggcttccgtagagctgagcctgctcgtcacgtacaataatagttgggactgagcaaacatcataaaa

SEQ ID NO: 1335 - DNA, 127 bp, Homo sapiens
  misc_feature (1)...(127): n = A,T,C or G
agaagaacaacgtaananaatgantgcttctctggtaaaacannggggagggggntattaaccttcnaggatnctgtttttcgcacttctcatcannaagaatgggaatgtctcaattttgctcaga

SEQ ID NO: 1336 - DNA, 145 bp, Homo sapiens
  misc_feature (1)...(145): n = A,T,C or G
ctgagtgtgatccctgggacccacatgatggaanagaanagagcaacctcccataaactgncctctgacttctacaccaangctgtatgtagcatgtncccacacaccttcatgcgcatacacaacgaaaataaaaagcaaaaga

SEQ ID NO: 1337 - DNA, 110 bp, Homo sapiens
  misc_feature (1)...(110): n = A,T,C or G
ggattctagggaatgacanaatttcctggangatgaatggagggnggnnatgntaccctgtgcctgacgnaggcantaaccgtgncagatngtgacaatttagaaaatat

SEQ ID NO: 1338 - DNA, 322 bp, Homo sapiens
  misc_feature (1)...(322): n = A,T,C or G
tgtaaagggaaataagggacggcctgaacagacttcctgctnctnctgttggggnngggggngatggccacagttaacaaaggcaaaccacaactaaggaaaaaggtacatccagcantggctaattccacaacnaaagtcatatcggaagaaaagatggngtcgtttctttactttnaanataacccagaggtcatantaaacaatangnggggagatcgaaaggctctgctatcacaggntccagtggcaaaaggnagtgtgcagacttgggggcccanaattgcatnncaacgcaagcagcattgcatgattttggcac

SEQ ID NO: 1339 - DNA, 108 bp, Homo sapiens
  misc_feature (1)...(108): n = A,T,C or G
gactgagcctgcctggatggcagtgagcctcagttcgtttaggtcgtctctacctgttcagcttcagtgagcacaacacgggtaaacctntgcttgagctcgagtcct

SEQ ID NO: 1340 - DNA, 277 bp, Homo sapiens
  misc_feature (1)...(277): n = A,T,C or G
actgaggtgtgacgaagaacagtctctgtacatgaagacgaagacgactgctctgggctcaggtatatctnaaccttggntctgatctgngagaaaaagagaccacctggatctggcatcccggnttttgaatccaaacatcctctctctgaggntntttctcctnagggaagnttcccgctngncagcttnganatcctcanaagagagccttgnattggaaacgtctccgttaaangcgataacatgcccttcgntattcaccacaaaaaaaaaa

SEQ ID NO: 1341 - DNA, 133 bp, Homo sapiens
  misc_feature (1)...(133): n = A,T,C or G
actgagaaagctgttttttttaattttgattttctcaagacataaagtgaaggctgcttttcatctgtctgcactatcggnntggnngnnncganngccaaactaaccgtatataaccctaggaaacttttaa

SEQ ID NO: 1342 - DNA, 332 bp, Homo sapiens
  misc_feature (1)...(332): n = A,T,C or G
gggccttggagcctagaatgacagcaaagtaaaaccagtctcaactcctgaaggctctcgnnctgcaccaggaatgcgtccatagccagatcctgcaggggagacctgacaagatgagagacagcacagacttggaagccccgcctcctctgtggatctgaaggctcctctgtagaaaagacaggacctggggcctgagaggcgaggccgctcaacaacagaacagctcatgatgaagctgagtctggcctcgaactcgtggacttgcagccctgagcaaccatgcctggcttggctttactgttaaaaatacttctctgtaaaaaaaaaaa

SEQ ID NO: 1343 - DNA, 327 bp, Homo sapiens
  misc_feature (1)...(327): n = A,T,C or G
actgagggcagcatcgcaggcggcccaanggcaggggagcgcggggcaagctcacttgggtcctggaaaggccaaaggcgctcagaagcccaccgcccaggacttgcgacaagctgggcggcggccgaagacagtccttgngagagatgcccagnatccggcggggctggcttcgcagatgcccggtgcccanccaggctgtccgctgagatgcccgtgcggctgcttgatcggctcggagcagcttcccccaggaatgactccagccgtctgggaagcaaggagggacagggtttggagcaataaatgtccccaaggcccgaaaaa

SEQ ID NO: 1344 - DNA, 182 bp, Homo sapiens
  misc_feature (1)...(182): n = A,T,C or G
accgaggacttcagggccctgnanaagactgttgaggacatnaanntattctaanccaccctcctgntcttctttctcctnctgtcccncatnatncccatggaaagccttgcctggactattctntcatgcttnggaactntctggatttctacnctcananacatgctttgtactggcta

SEQ ID NO: 1345 - DNA, 198 bp, Homo sapiens
  misc_feature (1)...(198): n = A,T,C or G
agatctcatacacagttgccaaactgaatgctgccatttcagaacgtgaagaggntanagggagannnganctgnttnatcctgttanngtagactgnaagctatggcaaaagagcnancacaagagctgacaccagatgtnnacaangcccatgagttctcnacctgangctngatacttcctaattagacgacaga

SEQ ID NO: 1346 - DNA, 409 bp, Homo sapiens
  misc_feature (1)...(409): n = A,T,C or G
gggattctagacctggatgacatcctnngggacggngctgatgacaaagacagactggtagcagtatttgatgaacaggatccccaccatggaggagatggtaccagcgccagctccacgggaacccagagtccagagatattctggcagtgagctgggcaccaacaatagtttctgcttttcagccttatcaagccacaagtgaaattgaggtcacgccttnagttcttcgggcaaatatgcctcttgatgnccngccggagcancgacccagctttaactggcctttncacttctgtcagtgatancaactnttcctaagaggagncctccaggaaaaaccncgacccgntggtccacgacagctngntttctcaagcaaacaccngctgggaagtcccaaatcctg

SEQ ID NO: 1347 - DNA, 103 bp, Homo sapiens
  misc_feature (1)...(103): n = A,T,C or G
tgctaaatcccacacagtaataaatccgggacctcctganacagntgncncangagcncnnggctttattnttgaagcaccttccacccccaacttccttgac

SEQ ID NO: 1348 - DNA, 104 bp, Homo sapiens
  misc_feature (1)...(104): n = A,T,C or G
cctcatgctaatgtaatgcacggcncnnaccctgacccagtgactactggtgggccatagcnngctcacgntgaagccctgcacacccttgacctgagctggat

SEQ ID NO: 1349 - DNA, 239 bp, Homo sapiens
  misc_feature (1)...(239): n = A,T,C or G
cagaagacatcccaccacatggnccctgtgtttgtcctgatgagcgcctgcctggccaccgcaggtaatgcaccttctcaattgggaggctcttaaccttctcttgaattcctatttccttctcccctcagtctctttggctaaaaatatttagtccatattatcttatgtaaaatgtgaatatttatgttatttaggtaaataaaatatttgactatcatactgatacataaaaaaat

SEQ ID NO: 1350 - DNA, 322 bp, Homo sapiens
  misc_feature (1)...(322): n = A,T,C or G
gagtgctgggacttgaacccagatctcagtgtctactacattctcaaccctgcttctccaaagacagcgtctcanctatactctgtagccatggtcagcctggaactcccaagagatctgcctccggagtgctgggattaaagatttctaccactacaccgtggccttacaaacggaggggataggacatcatttaattcctgaagagttcctcagacaatcagttcttaggccatccacaaactgatcacttggtttgttgctctcctgaatgtggcttaatgaaattaaatgtagtttctgccccagtgaaaaaaaaaaa

SEQ ID NO: 1351 - DNA, 359 bp, Homo sapiens
atccctgcggtgggtgggaaggagctggatcttcacgggctctacaccagagtcactactttaggcggattcgcgaaggtttctgagaagaatcagtggggagaaattgttgaagagttcaactttcccagaagttgttccaacgctgcctttgctttaaaacagtattacttgcgagccctgggtccagtgcccagcatctcatagcccagatctggtggcacatgcctgtgattacagcactgggaaagacatgagagcagagaggaaaggacaagagaagagaaaatggtcaccttataagtgtttgctgtaaaaaagtttttatcattaaaagattttaaatcacaaaaaaaaaa

SEQ ID NO: 1352 - DNA, 116 bp, Homo sapiens
gtaacatctgcacctggttccaggctccaaggatgaattggtgggaatgggcctccccccaccttttataagtgcattctccattaaacatttgagccttgatcaaaacaaaaaaa

SEQ ID NO: 1353 - DNA, 271 bp, Homo sapiens
  misc_feature (1)...(271): n = A,T,C or G
tcccaccgctcgaggctcacattgggttcntgaagtatgatcaanggntcggcttnctcttnttacntgacacttncttccctgnncgacaggggccgtngctganannnacctgaagatgagatncanaccctgganatatggnggcgcangccactgcngctgcaggagatgngcactgtcgttttatgtttcctagatcagaaccangctacagcccaggaaacacctgtttctgtaaataaagttttattagacagaaaaaaaacaa

SEQ ID NO: 1354 - DNA, 165 bp, Homo sapiens
  misc_feature (1)...(165): n = A,T,C or G
actgaggaggctaaagcagaagggtcactgntacttggggagtgacttcaaggccagcttcaacaacttagtgggaccctgnctcaagtaagtaaaaagaagactggaattatagctcaattatagtagaacacttgcccattatgtatgagaaaataaaagaaa

SEQ ID NO: 1355 - DNA, 307 bp, Homo sapiens
  misc_feature (1)...(307): n = A,T,C or G
tggatgcaggtccaaccaacggatcctntgnggtccaaacctnntcaanccaggagcccccgangncaccgccctgtgagcctctncttgcggatgccccaccagcccgtcacaagctgtcacccgagtctccgagaaattctctggggagacctnagnttcagctctgtcacccacatctgctgccattgtggggggcttcaccccaagccctagngaggcgcatcagnccttggactcccagacccactgaaaaaagtncntctttcactcaggnctttgncttggnctctgggtatgggagcag

SEQ ID NO: 1356 - DNA, 354 bp, Homo sapiens
  misc_feature (1)...(354): n = A,T,C or G
ctcgagccaagaacctttcgcccgccccgcccgcgcgacccgtcccactctgcgcccngnccgngccgccaatggaaaagctgcaaatggcgcgaccagcctgccgcgggcgaccggcagaaattcggtgtgtgcaagcccgggaaggctccgtcagacctggaggtggggacagcgtgttgcaggccccggggagatggcgcctacacgcngnncggcctccatctctcccagggttcgccaagccacggcgcagccaattggctcggagacatggcggggtgccttttcgccttggctctctgcggcactctgctgccgataatcgacgccttggaactggaaaaaaaaaaa

SEQ ID NO: 1357 - DNA, 370 bp, Homo sapiens
  misc_feature (1)...(370): n = A,T,C or G
gcttctgctacttctgcctcattgttccggacncacggngnagnnatgctncnangactnttttatcaatttggagntggaancncaccncgcncgncctttnattagntagnctggtggcatcaaccattactaccttgnaggntttgaanggattagccccatancctgggggtttttactttttccagacaagntctcaagnatcccagggnggcttcctgactctctcnagtanccgaggataaccatatacttctgatcccacctgnacctnctgagtcctgttttaatggggngctgagactcgaacccatggcttcncanatgctangcanacgcttttcgagctgagctccacccccagcct

SEQ ID NO: 1358 - DNA, 104 bp, Homo sapiens
  misc_feature (1)...(104): n = A,T,C or G
ccagcctggcctacattgagaaacctcattttngnaaagnnaaatacttcgtcaattaacatcgcanntggttcaataaagacttttggaaagtgtcaaaaaaa

SEQ ID NO: 1359 - DNA, 261 bp, Homo sapiens
  misc_feature (1)...(261): n = A,T,C or G
atgtctgactgcacctgggaggaccctatgtcgcaaatnggcttatttcccctncgnagacctantcacangtcacncagtnnngagcgttcggtacagatttccggganggaacacacaggtcatttgcgcccgaaacttgcncgtgtgcttgcgccatttcctgcatcctggcgcgcctcctccctccccacctnccttctccgagcgncttaagcccaggcctccggcctccgtctctgagggtccttgggggggcgg

SEQ ID NO: 1360 - DNA, 330 bp, Homo sapiens
  misc_feature (1)...(330): n = A,T,C or G
cgaggagaagtacttgactctttatannantctgannnatcttggacgggactatncannaggagcaggctattttaaaaggcgnnngnagancgcttnccntancttcaaggatgcggaggacccananaanatcactnnacttatcccacgaggagancttgcattgaangagctagangccntgcccttncttangaaatacagagcnctgntgcttacgttactattcagatnccaaagtctgaccaatcattgcaccagtcgagctgacaaccagtgctggctgtttgcctgtaccaactattaaaaaataattcagtttaaaaa

SEQ ID NO: 1361 - DNA, 107 bp, Homo sapiens
  misc_feature (1)...(107): n = A,T,C or G
ctgacattatgggattgcagactaagaaggncctactgacccccctcatacatccagctcgcccttttcgagtttcaaaccatgaccgaagtagtgaaaaaaaaaaa

SEQ ID NO: 1362 - DNA, 129 bp, Homo sapiens
  misc_feature (1)...(129): n = A,T,C or G
aactgagatgtctgagagcaaacaggtacgaagacagcgggaccagtgcgtcactcagtaaagcangcaaagaaacttcctgtaagcgacaaantagagaagggtcctgggactcttcactggtgatga

SEQ ID NO: 1363 - DNA, 128 bp, Homo sapiens
  misc_feature (1)...(128): n = A,T,C or G
tgtgttgacagtgtttnactcgaggatttgngtacnagaaacatcagngngatcacactcacgaaataatggnacnggagacattgatggaaantttcattcctcttattcatgattcagactgagaa

SEQ ID NO: 1364 - DNA, 120 bp, Homo sapiens
  misc_feature (1)...(120): n = A,T,C or G
acactgtgcacctttactactggaccagagattattcgcccggnaattggntnccntnccccttgcttcataactgagtgtngcaacagtgaanattggagctttgatcagaaaaaaaaa

SEQ ID NO: 1365 - DNA, 255 bp, Homo sapiens
  misc_feature (1)...(255): n = A,T,C or G
tacagggaatcaggannccctcccccttccttcatanctgagtgttgnaactannnggantgcagctnangatcanatnctgaaganaaactctatgaatatagacaatgnggtaaagtttttgcatgncacagtcatcttcaaagncatgaaagaattcgngctggagaggaatcctgngaatgtaatcaatgtaataatcacagtactcttcaaaatcctgaaaaaaatcatactgaagagagactatatgaa

SEQ ID NO: 1366 - DNA, 155 bp, Homo sapiens
ttacgacaggaagaagcctgacataagccagttacatgctcatcacccctgcgagaatgctgtgcaggagctgaagacttgctttcagtcctcatcctacagtgactgcggcaccggaagtcctggtatgggttgaacaaaccaccagcgttaaa

SEQ ID NO: 1367 - DNA, 404 bp, Homo sapiens
  misc_feature (1)...(404): n = A,T,C or G
tgagggaaagtcatggaggcttcaggntcttcttcccagtctcaagacagtggtggagtccacagggaaacggaagatcactaccaaggagacatgagctccacnagcatcatgggaaggcccggnagcgatanangagagacaggtnttnctcttcatcctcatnctcngcatcttcttcctcctnttcctcctnatcttcttcctnctcctnagncngcntcnatgangaccagncctncntaggtcccagnnnncacnaaaggangccccncagggacaganttgcgtggtgcatgaccatggngaactgnaagngctaaaggacgagcttnanctctgcgnaggtgctgctgcggaaatggtncctactggcgagncaggactcctaaggagaggttacg

SEQ ID NO: 1368 - DNA, 108 bp, Homo sapiens
  misc_feature (1)...(108): n = A,T,C or G
gacatgatacggatgnccggattcanctgttaaagcagttactggaggactccacctnanatgacgacgggagcagctccagctcctcgggggacagagagaagcgca

SEQ ID NO: 1369 - DNA, 485 bp, Homo sapiens
  misc_feature (1)...(485): n = A,T,C or G
gactgaggtaaacttggnaccgntcaanaggtagtggatctnacagaccccanccgtncccgcttcactctgcaagagctganggaggngctgcaggagcgaaacaagctcaagtcgcanctgctgctggtgcangaggaactgnagtgctacaggagtggtctacttccacccanaganactncaggaggaagaagagagaaggatgctgtggttgccatgggcaacggcgagaaggaggagaggaccattatgaagaagctgttctctttccggtcagggaagcatacctagactgaaaaccatcaccaagatggtgaccctcttgacttgagaagacaattgccaatatgccttctggaaccaccttcctgtgtcaggaatgtgccttggcttgctcctgcacagagcagtcagaggaagatgctccctcccatggctcacctgctctctggggacagacctggacagtcagtaagctttga

SEQ ID NO: 1370 - DNA, 378 bp, Homo sapiens
  misc_feature (1)...(378): n = A,T,C or G
ttttgctgatcgccttgcaagttttcatcgagtttggagtttcccaccaaatgaaagtacaggaaaagaagtgacctgcttggcctggagaccagacggcaaacttttggcctttgctcttgcggataccaagaaaattattttgtgtgatgtagaaaagcctgaaagcttacactccttctctgtggaggctccggtctcttgtatgcattggacagaagtgactgtggaaagcagtgttttaacatcgttttataatgctgaggatgagtccaatcttctcttgcctaagctgccctagacccggacgtantcatcaaagtggagaaacttgaccctgagttggactcgngacccagcttgacagcattgcgttag

SEQ ID NO: 1371 - DNA, 136 bp, Homo sapiens
  misc_feature (1)...(136): n = A,T,C or G
tgtagaagagacactggcggccagcttgcgcttggggggaaacgattgaacatagtatnggggctccatttnactaacccaggctacattgncganaactaacagcntgaagntcctgacggccttcctgccagtt

SEQ ID NO: 1372 - DNA, 331 bp, Homo sapiens
  misc_feature (1)...(331): n = A,T,C or G
aactgaggtggaaggacacatacgctgacgngctggcaatgcgatccatggtgcggtttancggaaggatctagagacnagtcagctgaccctgagtagccaatgagaattctccagttgctgctttaaattagagccgtggccattacaggagccgtcactttgcttgcctgccacggaatccaggcttgtgcacctggagatcccttggggcccgatgacctgaagccttcccccaggaaaaactgaagcctgaacactgtctacttttcctccatctttctttctcttagatggtgaaataaagaactatcagacagcaaaaaaaaaa

SEQ ID NO: 1373 - DNA, 461 bp, Homo sapiens
  misc_feature (1)...(461): n = A,T,C or G
gctgccaccctctggaggntcccgagtcctttgtggntctgngngaaaagactctgtgtacantgtgctacnganccngagngcggcatgtnctgtacctcnttgatttgcccanaacctgcgcccagganggtctggtgctgnactggntggactgaccacagtgcctgtcgtccagcttgcccagctggcatggaatataaggagtgtgtgtctccttgccccagaacctgccagagcctgtctatcaatgaagngtgtcancagcaatgtgtagacggctgtanctcgccctgagggaganctcttggatgaacaccgatgtgtgcagagcttccgagtgtccttgccttgcacgctgggaaagcggnaccnctccnggcacctncctnttctcnggacttgtaacnntttgtatcngcngancagcctatggatntggagcaatggaagaatgccca

SEQ ID NO: 1374 - DNA, 124 bp, Homo sapiens
  misc_feature (1)...(124): n = A,T,C or G
tgatcattaggaactttgatcagaataganggagcagaggtnctaaactcnattcnccagagggcntgatgaatctntggntcagctncagtnngtactcatctacataaaataaatgattaaa

SEQ ID NO: 1375 - DNA, 261 bp, Homo sapiens
  misc_feature (1)...(261): n = A,T,C or G
tttctactggaccactatattattgggccggganatctnnntcccctncncntngcttcntnactgattgcttcatnagtganagtggagctttgatcattgnagctttgatcagnatttnnacnanagacntttgnccnatatccnaaggngngggcatactggagagaaaacttatgaatgtaatcaatgtggtaaagcttttgtaagacccagtcaactccaaacacataaaagaacacattctggagagaaacccta

SEQ ID NO: 1376 - DNA, 391 bp, Homo sapiens
  misc_feature (1)...(391): n = A,T,C or G
cagggaggatagccgatatatncttantgacagcttcnncnncngtntnganactgncacagctggactctggngaccactnacnntatgggnantgattgcctttcnncgncaacagcccttccnntttntnctacagnttgtggngnctatgggccagatatacggngatgagctgtacttcctgacagagctacacgaaggactccagcatggggagataggncaccccgtttatttctggttctattttgntttcctgaatgctgtatggntggtgataccaagcatccttgtgcttgatgccataaagcatctcactagtgcccagagcgtgctggacagcaaagncatgaaaattaanagcaagcataactaaagagccggagag

SEQ ID NO: 1377 - DNA, 326 bp, Homo sapiens
ctaaagctccagggaatagaaattcctgaagggacacgattacaaagcagacagtcagttccttgtggaaatcatggaaatcaatgaaagactcgcagacgcccaaagtgaggccgccatggaagagatagaagccactgtcagagctaaacagaaagaatttactgacaatataaacagcgcttttgaacaaggtgactttgaaaaagccaaggaactcctgacaaagatgagatacttttcgaacatagaagaaaagatcaagctaagcaagactcctctcttgttgctaacttaaagttttagaaataaactttgtatttctt

SEQ ID NO: 1378 - DNA, 452 bp, Homo sapiens
  misc_feature (1)...(452): n = A,T,C or G
gtggggtctttcaacttgccgggaggagcacaagaagaagcacccggatgcttctgtcaacttctcagagttttccaagaagtgctcagagaggtggaagaccatgtctgctaaagaaaaggggaaatttgaagatatggcaaaggctgacaaggctcgttatgaaagagaaatgaaaacctacatcccccccaaaggggagaccaaaaagaagttcaaggaccccaatgcacccaagaggcctccttcggccttcttcttgttctgttctgagtaccgccccaaaatcaaaggcgagcatcctggcttatccattggtgatgttgcaaagaaactaggagagatgtggaacaacactgcagcagatgacaagcagccctatgagaagaaagctgccaagctgaaggagaaagtatgagaaaggatattgctgnctacagagctaatggaaa

SEQ ID NO: 1379 - DNA, 415 bp, Homo sapiens
  misc_feature (1)...(415): n = A,T,C or G
cttcttgagagatcanccttggtgaanagttnctagcacacaggtgactacgagaagggtntgnaccanctgtcaaatgccnttgctgtgtgtggacagcctcagcagcctgntgcaagtgtnacagnnnactctttcgtcnccagagtgngcnnatgcttgtnaccaagctttccgaccatnagtnagagaattgnnagngctcaaagctnggntnnagatgatgtggaatgagccagataccaacaagatanaatctcagtanaataatctnaacnnttaggcttggaagctggtcanctctgggggattaagggcaaattatgctgtcatgaactgtcccacactgacgtnctgccaaagcgaatatgaactttggtnagacccattgtctggnctatttatttttccagta

SEQ ID NO: 1380 - DNA, 427 bp, Homo sapiens
  misc_feature (1)...(427): n = A,T,C or G
tccgtcctagaactgacaagccagattctgggagccaaccctgattttgccaccctctggaactgtcgcagagaagtgctccagcagctagaaacccagaagtcccctgaggagttggctgctcttgtgaaggcagaactaggcttccttgagagctgtctgcgtgtgaaccctaagtcctatggcacttggcaccaccgctgctggctgctgagtcgcctgcctgagcccaactgggcccgggagctggagctgtgcgctcgcttcctcgaggccgatgagcggaactttcattgctgggactatcggcgattaaccaanggnnagncttttgttctcactgcanantaaaataatcaanactgacagcctgaccacccngaacttctccaactattcttcctggcattatcgctcctgcctattg

SEQ ID NO: 1381 - DNA, 260 bp, Homo sapiens
  misc_feature (1)...(260): n = A,T,C or G
cctgggagcgttctgggggcattgggcaacccctttcactccttctgaggaacanatgattgccgaggctattcctnntctgaaagcntccatcnananaggcagangactttgnnaagancatgaantgagaggngagagcctggancaggatcccnngcatcntnctaacttattcaatcatcntgtctttggaaccactngagaatctatttngcgtctgatggagggtgtngagncagnatcatgcatctcttcca

SEQ ID NO: 1382 - DNA, 414 bp, Homo sapiens
  misc_feature (1)...(414): n = A,T,C or G
ctaacgtacagaacagcttgcaagttaccgatttgtacagaagcgatgcaaccttcatcttgttgatatctggaatatgatcgaagctttccgagacaatggccttaacacgctggaccacagcacggagatcaggcgtgtnccgcctggagaccgtcatctcgtccatctactatcagttgaacaagcgccttccttctactcaccagatcagcgtggagcagtccatcagtctcctactcaatttcatggtcgccgcctacgacagtgagggccgaggcangttgaccgtgttttcagntaaagctatgttagcaaccatgtgtggtggaaaaatgctggacaaattgagatacattttctcccagatgtcagattccaatggcttaatgatgttnggaaagcttgaccagt

SEQ ID NO: 1383 - DNA, 146 bp, Homo sapiens
  misc_feature (1)...(146): n = A,T,C or G
gcttgctgacaaagaagctgccgncctgaccatctancctctcagacntnangctgnggaccatananctanngacactnaggntgntggagacctcacccaggaagcctttgatcttataagtaaaggtatgcgaaaaaaaaaaa

SEQ ID NO: 1384 - DNA, 419 bp, Homo sapiens
  misc_feature (1)...(419): n = A,T,C or G
gggcgtgtgaccccgctgcctcccctttctccctgctgctcgtgtccagaggatgagcccagccttcaggaccatggacgtggagccccgcaccaagggcatcctgctggagccatttgtccaccaggttggggggcactcatgcgttctccgatnnaatgagacaaccctgtgcaaacccctggttccgagggagcatcagttctacgagaccctcccagctgagatgcgcagattcactccccagtacaaagggaagtgtggtncnctganacccnncttcccgctcctgtgcgcccanagntggtgcccgcctnacntntgnccnctctntntgagcacgcattnccctgcagcangcaagnggtcgggcagcanagactgagcanatngaatgaccgtggggcatataaggccta

SEQ ID NO: 1385 - DNA, 193 bp, Homo sapiens
  misc_feature (1)...(193): n = A,T,C or G
gacctcaccacctccaaccacagnccctcncacggagaggtcttntgacagatgtcnatgagaacaacccacnactnttcgccggaagaggaacatgtgcnccagaccttcntaannacttcaatatgatcggagcatnnatangagggcgnctatgattctacagagaactgaaaggaaaacttttgatcag

SEQ ID NO: 1386 - DNA, 474 bp, Homo sapiens
  misc_feature (1)...(474): n = A,T,C or G
actgagcttgagatccgaaaagcgggtccgaacacaggatcatagagacgacgggcgcagagcgtatcccctggcggcaccacggaggtaacgcggagggcggctagagcgtcactcgcccaggcggcttcctcttcggcagtcctccttcccaacatggcgcagtcgattaacatcacggagctgaatctgccacaactggaaatgctcaagaaccagctggaccaggaagtggagtttttgtccacgtccattgctcagctcaaggtggtccagaccaagtacgtggaagccaaggactgtctgaacgtgctgaacaagagcaacgagggaaaagaattactggtcccactgacgagttctatgtacgtncccggttaagctacacgatgtggagcatgtgcttattgatgngggaaccggntactacgtggagaagacagctgaggacgccaaggacttcttcaaaaggaa

SEQ ID NO: 1387 - DNA, 152 bp, Homo sapiens
ctttatctttggtggtcggcatctgatgaacaagcgagccaagtttgaacttcggaagccgctcgtgctctggtcgctgactcttgccgtcttcagataactgtttggtcacgttgcttagtaaataaaagtccacactatgaaaaaaaaaa

SEQ ID NO: 1388 - DNA, 769 bp, Homo sapiens
  misc_feature (1)...(769): n = A,T,C or G
gagcaagagcagctctacctgcggtctggtgtggtgacctccgcaacctttgagcagccagggcggcaggtcaagctgtgggtgaagatggtgaccccgctaatcaagaacttcttctgagaacaggaatggccttgatgaagatgacgggcatgactggggtcagatccttcaaccgggcttcagcaatgactccggtctgggtgtcccagcgagctcctgtggggacaatggagctgagggtctgggtgccctaggggaggcagaacccactgtttggatgctgaccgtgaaaaagggaggcacggtagggagagaggcctggcctccaacctccccactcttttcagagacaggccagtgactgggagccatgaagcgttcangccaggtgccanggtctgagagtgccaaacatggaggaatgtgaaccaaggacttcgangtgactcttgcattgcccgtaatgggctctgaagctgnatcttcttaaaactttaatcttaagccnttttcaatgntcaantgggcannagaaaaacttgganccgcaagnttcaanaatncccaagcaaatgggtnccctttccttgaaacccccttccttgggggnaaaggggcttaacttcttcttgggggaccctttangggggaaataaaggttanttttttttaggaatgcccccntttttttaaacccccttttttttgggcccctttaaacccccnnaaanntgggnttggtggggccccctttaaaacccttaaa

SEQ ID NO: 1389 - DNA, 458 bp, Homo sapiens
  misc_feature (1)...(458): n = A,T,C or G
actgaggtgaatgaggactctggggnnactcatggagaagatgcggttgtgatcctggagaagacaccatttcaggtagaacacgtggccgcagctcctaacggggagccctgagctcaagttgcagttctccaatgatatctacagcacctataacctgtttcctccaaggcatctgagtgatataaaaacaactgtggtgtaccctgccacagagaaacacctgcaaaaatacatgcgtgaggacctccgcctgatccgagagactggagatgactacaggaccatcaccttaccctacctggaatcccagagccttagcatccagtgggtgtataacattcttgacaagaaggctgaagntgaccggattgttcttgagaacccanacccttctgatggctttgctctcntcccagaccncangnggaaccagcancagcttgatgacctgtatt

SEQ ID NO: 1390 - DNA, 114 bp, Homo sapiens
gtactgaggcaagttacattgcctcaacacagtacacccgacgggtacgtggcgaaagcagcggagggtcaaagaaggatactgtgccccaagaggaggtcccaaaaaaaaaaa

SEQ ID NO: 1391 - DNA, 204 bp, Homo sapiens
  misc_feature (1)...(204): n = A,T,C or G
gactgagctccccctccccagaggtaagcagccctccagcgccaagcagnttagcatgtgtgactctggacaagacaaccttcccaggtttctgaccgtanagcagcgaanaagacgaccatgtctgagggcaagatctgaggactagggatggngctcagacctgccacacccaaggtctcttcagcacagcagaaaggaaga

SEQ ID NO: 1392 - DNA, 377 bp, Homo sapiens
  misc_feature (1)...(377): n = A,T,C or G
ttccctggtggactccagtcaagtgtcgacatttctgatatccattcttcttatagtctatggtagtttcaggtctcttaatatggactttgaaaaccaagataaggagaangacagcaacagttcttctggctctttcaatggcaacagcaccaataacagcatccagaccattgattccacccaagcactgttcctcccgattggagcgnctgtctctctcctcgncatgtncttcttctttgattcagttcaagtcgttttcacaatatgtacagcagganntgnanaacnnnnttccncnnntggtgatatgcctnagtgantgnnatcaccanggctgctgctcaggctggnaacaaactaagatttcccgg

SEQ ID NO: 1393 - DNA, 344 bp, Homo sapiens
  misc_feature (1)...(344): n = A,T,C or G
tccgaacaaaaagtggggtctgtgngccccggaagnggacataccgattgactgnggggaaaggaaacatgganctcaaaactgangggcgcccagacatgaaaacagacctgttctccagctcgtgcccaggaggaatcatgctgaaanagacgggccagggctaccagcgctttctcctctacaatcgggtcaccacaccctccaaanaagtgtgtggaggaattccagtctctgacctcttgcttggacttcaaagccttcttagtgactcccaggantcaagaggcctgcccgctgtccagcaagtgaccagtgacttccccgggtcctaaaaaaaaaaa

SEQ ID NO: 1394 - DNA, 121 bp, Homo sapiens
  misc_feature (1)...(121): n = A,T,C or G
aacataagcactcacannatgaanccctgccaaaaaatggaaggaaacctagaaaaggagnatganccaaagcctnagnannagccaacagccngagnaaaagcctctaggaggggcagga

SEQ ID NO: 1395 - DNA, 320 bp, Homo sapiens
  misc_feature (1)...(320): n = A,T,C or G
ccctgacatcccttggacgcagacccttctagccgattacatcaatgggttcccgggagacaccttcttcttgctctaagacccttgaaaccttggacctggagacttccgacagctctagccctgatgctgacagtcctctggaagagcaatggctgaaatcctccccagccctgaaggaggacagtgtggatgtggtactggaagactgcaaagagcctctgtccccctcctcgcctncgacaggcagagagatgatcaggnacaaactcnaagcgaaccgncngagcattgaanacatntgtctctgctgaggaact

SEQ ID NO: 1396 - DNA, 418 bp, Homo sapiens
  misc_feature (1)...(418): n = A,T,C or G
tgccctgcatcacctggtggnggcagtgcaaagcccggtcagtggccctggcaggtcagcatcacctacaatggctaccatgtttgtggcgggtcgctcgtgtcaaataaatgggtggtgtctgctgctcactgcttncccagagaacacagcagggaagcgtatgaggtgaagntggngncccaccagctanactcctacagcaatgacactgtggtccacacagtgnctnagatcatcacccactcaagctaccgagangagggctcccagggggacatcncgctcatncgcctcancagtcctgtcaccttntcccgntacatgangacaccatctgcctncctgaagncaatgcctgctttttccaacggncnttcactgtnctgncacggaatgggntcatgtggctccttga

SEQ ID NO: 1397 - DNA, 179 bp, Homo sapiens
  misc_feature (1)...(179): n = A,T,C or G
agaaggtggccactttnnactatatgcatttgaagatgtgctccctccacngaccaactcagccacctgccacttgaggggtccacgggggcaatgnngggaggaagcantggaggggctccccctaaacgtgggagtccaggctctgaacaataaatggcctctcatgctggcatgaa

SEQ ID NO: 1398 - DNA, 357 bp, Homo sapiens
  misc_feature (1)...(357): n = A,T,C or G
gaactgagctggattaancagctctccagtatgaacttcatagatggcagcatcataatgtgacgtcacggcttgaacatgactgacagcatcttcagctgctgaggtccctcatcagctcatggtgactccagtttgaactctcaagctgcctgcatccagagcctcaaacccactgtcctggtctcaggagcccatctacaagctcagaatgagggaccacatcctgactctgcatcactcctgccaatgagcattgcccacctagggccagaagtaacataaaggaataggcagtgaatgaanaatagagagctagtgtggnggtacacacctatgattccagcacttgggagg

SEQ ID NO: 1399 - DNA, 224 bp, Homo sapiens
gactgagagatgtggtatggtgtgttcctgtgggcactgatgtcctctgtgttctttcatgtccctgccggactgctggccctcttcaccctcagacaccacaaatatggtaggttcatgtctgtaagcatcctgttgatgggcatcgtgggaccaattactgctggaatcttgacaagtatgttagacattaaaataccggtcaaaaacgtgaaaaaaaaaaa

SEQ ID NO: 1400 - DNA, 414 bp, Homo sapiens
  misc_feature (1)...(414): n = A,T,C or G
gactgagccgccctgcaggctctgaagcgcaagaagaggtatgagaagcagctggcacaaattgatggcaccctgtcaaccatcgagttccagcgggaggccctagagaacgccaacaccaacacggaggtgctcaagaacatgggctatgccgccaaggccatgaaggctgcccacgacaacatggacattgataaggtggatgagttaatgcaggacattgctgaccagcaagaacttgcagaggagatttccacagctatctccaaacctgtgggctttggagaagagttcgacgaggatgagctcatggcagagtnttgagncttgancaanaagagttncgcaagaatttgttggagatcagtgggcccgaaacagtccctctaccaaatgtcccctccgtaccctacc

SEQ ID NO: 1401 - DNA, 248 bp, Homo sapiens
  misc_feature (1)...(248): n = A,T,C or G
ggactcccctaggattccgagcacctttcgctgtggactccagccccacccgaggntggatgtggagctgaggaaactgacccaccgcttgctttcctgggagcccctttctctcctaattcatgagccacgcaggatgctggtccgcctgcgctttcagaacgcctgctcatagctgcgtacaaaggccaancannttnntgtggnnnngngnnatcaacaagggtgccaaggcagcccgttaccaa

SEQ ID NO: 1402 - DNA, 492 bp, Homo sapiens
  misc_feature (1)...(492): n = A,T,C or G
gacttcaggaaccatgccgaagccacacagtgaagcagggactgccttcattcagacccagcagctccatgcagccatggctgacaccttcctggaacacatgtgccgcctggacattgactctgcccccatcacggcccgcaacactggcatcatttgtaccattgggcctgcttcccgatctgtggagatgctgaaggagatgattaagtctggaatgaatgtggctcggctgaatttctctcatggaacccatgagtaccatgcagagaccatcaagaatgtccgtgaagccacagaaagctttgcatctgatcccattctctaccgtcctgttgcggtggctctggatacaaagggacctganatccggactggactcatcaagggcagcggcaccgctgaggtggagctgaanaagggagccactctgaanatcaccctggacaancgcttacatggagaaagtgtgacgaagacatccctggggtt

SEQ ID NO: 1403 - DNA, 465 bp, Homo sapiens
  misc_feature (1)...(465): n = A,T,C or G
actgaggaatctcatgcactagggnaaggaacctgaaaacccagcagacatgattgaagaaggagagtgtatcctatctgtgaacatcttatatcctgttatatttaataagcacaaagaacacaaaccataccagaccatgttggtactgggcagtcagaagctcacagaactgagagattcaatttgctgtgtcagtgacctccagatcggtggagaattcagcaacgcgccagaccaagcccctgagcacatcagcaaagacctctacaagtcggcttttttctattttgaaggaacattttacaatgacagaagatacccagaatgcagagacttgagcagaactattatagagtggtcagagtcccatgatcgaggatatggaaaatttcagactgctagaatggaagatttcacatttaatgacttgcatattaaacttggctttccttacttatactg

SEQ ID NO: 1404 - DNA, 111 bp, Homo sapiens
  misc_feature (1)...(111): n = A,T,C or G
gactgaggaaaatcttctggntgtnattttatataaccaaacatgtcatggnccttcacagcatacnaatagttttgacgttttaaatanaagtatccagcacagacaaaa

SEQ ID NO: 1405 - DNA, 425 bp, Homo sapiens
ggggtctttcaagagcagccggtatcagttccgcaatctggcagaatgcctacagaaaattcgagacatgattgccgaggccagccaggtacccaaagagccatccaaggaagatgctcggcttcagagactcaggattgaaaagatgaatcgggaaaggctacgacagaaaagactaaactctgccctaaagaccagcaggaggatgactatggactgaagtcggccctccctgctggcatagacctgagtgccagtgcagctcagcagagcactgacacacacaggagacttttctcgattaaccgccctgcccgagcagcgttcctttggagggaggctgcagatcatccagggctgccccttccgttatccacctcatgaatcactggctgcaataaacatcgaagcacaggaaaaaaaaa

SEQ ID NO: 1406 - DNA, 243 bp, Homo sapiens
  misc_feature (1)...(243): n = A,T,C or G
gatgaccgagaagcgcttgaaaaggagaaagcaatacattgaacgcntgagaaacctgactgaggaagaaaggcgggcagaacttcgggcaaatggcaaagtcattaccaacaaagctgttaaaggcaaatacaagtttctacagaagtattatcaccgaggtgccttcttcatggatgaggatgaagaagtctacangagagactttagtgcacctactcttgaggaatttgacaggatggc

SEQ ID NO: 1407 - DNA, 128 bp, Homo sapiens
  misc_feature (1)...(128): n = A,T,C or G
cctgagcggggcatctggnggccgctgtctatgctctnttttccnctgganagaatatttaaggaangctccttcattaagtattaagnatatggaaataaagaattactcagtcttaaaaaaaaaaa

SEQ ID NO: 1408 - DNA, 528 bp, Homo sapiens
  misc_feature (1)...(528): n = A,T,C or G
cactgaggagtctagagcaggaggatcttgagttnaagngnaaggntggtatangtagtgtgtggagaacagctggnggcaacgagatggctgcttctgtcccatgggcctgctgtgctgngcttgccgctgccgccgccgntgtatacacgcagaaacacagtccacaggaggcaccccacgtgcagtatgagcgtctgggcgcagatgtgacgctgccgtgtgggacagcgagctgggacgcagctgtgacatggagggtaaacgggacagatctggcccctgacctgctcaacggctctcagctgatactgcgaancttaaaactgggccacagtggcctatacgcctgttttcaccgngnanttcttnggacttggggccncnaangcctttttaaatntggggtttgccgcccgcgggagcctggtgcttcagcttgccgcttcaacaacttaccccaagggcttctactgcagcttggaacctgcccaacccccacctacatncccaataccttcaaatgtg

SEQ ID NO: 1409 - DNA, 343 bp, Homo sapiens
tgagagattactggcttcgagtcccaagcctctggcattagcttcctgagagctggacttacagagtgctttccttatggtaaaaggttctatcccacagcccacattgtcaggaatggctccctctaaagtgaaagtggataaactcaagagaaaggattggatcatacacggttttttttctcctttgagattataatgaacatggtcacaccacaagtaaagtccgaagtaggacagaaaacgctctgaaggcttgtttgatcacccgttatcgttaaaaatagctgacccctaacaatatgtacccaaatataaaatgtaaataaaaaataccaacaca

SEQ ID NO: 1410 - DNA, 481 bp, Homo sapiens
  misc_feature (1)...(481): n = A,T,C or G
attcatgggcattgcagtctaagaaggtcctactgacccccctcatacatccagctcgcccttttcgagtttcaaaccatgaccgaagtagccggcgtggggtgatggccagcagcctgcaggaacttatcagcaagactctggatgtcttagtcatcacaactggcctggttacgctggtgctggaggaggacggnaccgtggnggacacagaggagttctttcagaccttaagggacaacacgcatttcatgatcttggaaaagggacagaaatggacaccgggtagtaagtatgtcccagnctgcaagcaaccaaagaaatcgggaatagccagagtcaccttcgacctatacaggctgaaccccaaggacttcctcggctgtctcaatgtcaaagccacgatgtacgagatgtactcggtgtcctacgacatccgatgcacaagcttaaggccgngttaaggaatctgcaactaaag

SEQ ID NO: 1411 - DNA, 101 bp, Homo sapiens
actgagggaagtagcttctaacaatgaactatggcaacaattctgcttcaaaacttactaatacaattggatgaacagttggggcgtgtttccaaagaaaa

SEQ ID NO: 1412 - DNA, 438 bp, Homo sapiens
  misc_feature (1)...(438): n = A,T,C or G
actgcgaaattatcactttctggccatgttggatttgacagtctgcccgaccagctggtcaacaaatccacttctcaaggattctgtttcaacatcctgtgcgtgggtgagacaggtattggcaaatccacattgatggacactttattcaacaccaaatttgaaagtgacccagctactcacaacgagccaggcgtccggttaaaagccagaagctatgaactccaggaaagcaacgtacggctgaagctaacaatcgttgacacagtgggatttggagaccagattaataaagatgacagctataagcctataatgnaatanatngacncccantnngatgcctantgcaagaagaattgaaaattaaacgttctctcttcaactatcatgacacaaggattcncgcctgcctttactttatcgcccccacgggac

SEQ ID NO: 1413 - DNA, 451 bp, Homo sapiens
actgagtatgacagtcatgtccctctccggggcctcaaggacgactttcacagtgacacagtactctccatcttaaatgagcagcgcattcggggcatcttatgtgatgtcaccatcatcgtggaagacaccaagtttaaagcccacagcaatgtcctggccgcctcaagtctttatttcaaaaacatcttttggagccatacgatctgcatttccagtcacgtcttggagctggatgatctgaaagccgaagtgtttacagaaatacttaattatatctacagctctaccgttgtggtcaaaagacaggaaaccgtcactgatcttgcagctgcagggaaaaagctgggaatatcattcttagaagaccttagtgaccgcaacttctcaaattccccaggtccttacgtagtctgcattactgaaaagggagtggttaaagaagaaaaaa

SEQ ID NO: 1414 - DNA, 475 bp, Homo sapiens
  misc_feature (1)...(475): n = A,T,C or G
aactgaggcttttgtggctacaggaaccaatctgtctctccagttttttccggccagctggcagggagaacagcgacaaacacctagccgggaatatgtcgacttagagagagaagcaggcaaggtatacttgaaggctcccatgattctgaatggagtgtgtgttatatggaagggcttggattgatctccacagattggatggtatgggttgcctggagtttgatgaggagcgagcccagaatctgatgtcattgatgatagccaanctggggaaatcatggtgaacttcacaggctggttgaacaanngtnaagtgatcagccctagatttaatgtgcaactcaaagacccagaaaatagcggancaatntgctctcacctgncactggcttccagngnactgacnncttcagctggagncatggaccatgaagaacatgaggaanacacacncgaagggaaaattcttgtt

SEQ ID NO: 1415 - DNA, 438 bp, Homo sapiens
  misc_feature (1)...(438): n = A,T,C or G
agactgaggaggaatctttgagtatgcggatggtcccaacgcccaggtcatgaacgctgaagagcacgcctttcgattttctgccaacatcatcaacagaaacaggactctgctgcccaacacgaccctgacttacgacattcagaggattcacttccatgacagttttgaggccaccaagaagggtaagaacactgaaaacatgcgtgcaacacatcatattaaccgtagtcaccttgctacgggtcttattgcatctttcgttggcatcctactcgagtagcaataggtagcatacatataaagcagagactgtattagccccagagcacaccatctgcctgccgtaaaaagactttataagcacagcgtgctgctcagtgcccgcaacatcttgaccccagaacctacagaaaaanccttgaagttgacaccggg

SEQ ID NO: 1416 - DNA, 437 bp, Homo sapiens
  misc_feature (1)...(437): n = A,T,C or G
tgaggataccagcatgccagttcaacaccaaacactaaatacagatcagtagtggtggcccgatccaggatccagcagaaacagcanggctctgnggaattggtatgagtcggctggaatcagtcagagccagcagaantaccacaagaagttcttggtacatttctagtcttcgaagtgaagaccgacgaagaagatgagcaaagaccggcaaatcgttgcatgacctagcaatgcaagagtgtcctctcactgtctgtgggtctattcatactctttctaagcaccatgcgacctctcaagggtctgtttccagcaaaacatcacatgccctctcacgagacagcttncaggaaaacatcatgtggcacaactganttgttaaagaaaccagaaatttncacttcacatntccctttctgcttcaaaaaaaccca

SEQ ID NO: 1417 - DNA, 224 bp, Homo sapiens
  misc_feature (1)...(224): n = A,T,C or G
accagtgacaattactactacacccacagcatttggcacatcctactggctggtagtgcagcatttcttctgccaccacgagaggaaaaagctgggtcctgggcctgtttgcagaagttcccttgtcactaccagatctgcaggaatgatcgggatgagttgtacacagtgacctgataaggctggntcatggacacctgaaactctaatgacctcttcagcta

SEQ ID NO: 1418 - DNA, 176 bp, Homo sapiens
  misc_feature (1)...(176): n = A,T,C or G
actgaggaaaatatatgcaatgatctacagcaaatttagtggctgtaagtcagcaaggnaggnaatnntgaatattataaacatagnataacttaataacngnnctttntcatgtaagatcttatgtatcctagtctaaccttaaactatgtagctactggacccttgagccttaa

SEQ ID NO: 1419 - DNA, 357 bp, Homo sapiens
  misc_feature (1)...(357): n = A,T,C or G
gggctctttctacatagctctggctgtcctcaangtgngtagaccaggctgcttcactgagngctaggnattaaaggaaggcaccaccaccccggntctgggccaatganancggcacnaaaagacccgntgntgctcgtctacccattactgattcatctccactccagaagnctanaganacagaagacnatcngtntcactncaatggncanataactgagtactgactggctcaggngatcctaaagncaactcaccaatgtagcanaagcccnagtgtnaccgactgaaggagaaaacacaganctacncattgcattnacctcccctattattcattacatgccaccccac

SEQ ID NO: 1420 - DNA, 529 bp, Homo sapiens
  misc_feature (1)...(529): n = A,T,C or G
gactgaggaataatgtctcagccaatcaggatgaagaactgggtcatgagacattcctgatgcaaatcgaccaggagacaaagaagtgtactttctattccagcactgggggctactggaccttggtcacccatgggggcattcaggccacagccacacaagtctctgccaacaccatgtttgaaatagaatggcatggccggcgggtggcacttaaagccagcaacgggcgttttgtgtgcatgaagaaaaacgggcagctggccgccatcagcgactttgtgggcgaggacgagctatttaccctcaagctcatcaatcgacccctcctggtgctgcgtggcctggatggctttgtgtgccaccgccggggctccaaccagctggacaccaaccgttccacttacgacgtcttccacttgagcttcagggatggcgcctatcagattagaggccgnggaggtgggttctggtacacaggcagccatggaagcgtgtgcagcgacggtgacttggcggaagatttcct

SEQ ID NO: 1421 - DNA, 552 bp, Homo sapiens
atgagcgggaccgagtgcaaaagaaaacattcaccaagtgggtcaacaaacacttgatgaaggtccgcaagcacatcaatgatctctatgaagaccttcgggatggacacaacctgatctccctgttagaggtcctctcaggcatcaaactgcccagagagaagggcaggatgcgtttccacaggctgcagaatgtgcagatcgccctggacttcctaaagcagcggcaggtgaagctagtgaatatccgcaatgatgacatcacagatggcaatcccaagctaacgctgggcctgatctggaccattatcttgcacttccagatctctgacatctacattagtggggaatcagggggacccaccaggataaaccaagtgagtgtttatccactcacagcctttcgtgaccctacatttccatgcacaggtcagaagctgcaccaatgagaagtcttcaggcgatgtagaaatgactgtggattctaatacacaccgaaattctgactgagaatttaaattgcagaataaagttttaaaacctaaaaaaaat

SEQ ID NO: 1422 - DNA, 114 bp, Homo sapiens
  misc_feature (1)...(114): n = A,T,C or G
catggcatccaaggatgaatnggccgggaatggactttccccccttttttcccccctcttttctaaagcgngtctgccattaaaaatttgaaccttgagagaaaaaaacacaaa

SEQ ID NO: 1423 - DNA, 239 bp, Homo sapiens
  misc_feature (1)...(239): n = A,T,C or G
tccatatatgaaatgagnaacactgaatgnccagtggaggttgcttgccagacaggagctgagcccacctgcagccaagcctccagcactaaggnccccancagtggaagnactcanacggatganagccatnaaggcntanctgantccagnanggacaaatnccagnctnctgcccaacatgccaaagctgnngatanccctnggccaccaccaagtcccctactgagattaccgtc

SEQ ID NO: 1424 - DNA, 461 bp, Homo sapiens
gataaaactccatccgcactcattctcacaccgacaagagaactggccattcagatagagaggcaggccaaggaactgatgagtggtctgcctcgcatgaagacagtgcttctcgtagggggcttacctctgcccccacagctctatcgcttacggcagcatgttaaggttatcatagcaacccctggacgacttctggatataattaaacagagctccgtatcactcagtggcataaaaattgtcgtagtagacgaagctgacaccatgttgaagatgggctttcagcagcaagtgcttgacgttttggaacacactcctggtgactgtcagaccatcttggtttctgccaccattccagatagcatagaacagctcacagaccagcttctgcataatcctgtgaggatcatcactggggacaagaacctgcctgcgccagtgtgcgggaaatcattcta

SEQ ID NO: 1425 - DNA, 457 bp, Homo sapiens
  misc_feature (1)...(457): n = A,T,C or G
ttaggcccggaggcggaaccggaagacccgggtactggtgccacgtccgttgctgtgctgcgaattccctgagtgggaccctggagggcgcgatggcagattggactcgagctcagagctctggtgctgtggaggacattctggacagagagaacaagcggatggctgacagcctggcctccaaggtgaccaggcttaaatcgctggctttggacatcgacagggacacagaggaccagaaccgttacttagacggcatggactcagatttcacaagtgtgactggcctactcacggggagtgtgaagcgcttctccacgatggcacggtctgggcgagacaaccggaagcttctgtgtggtatggctgtggtcttaatcgtggccttcttcatcctctcctacctcttgncgaggacaaggacgtgagccagngggagccaagggcagccaggcta

SEQ ID NO: 1426 - DNA, 313 bp, Homo sapiens
  misc_feature (1)...(313): n = A,T,C or G
ggaaagaagaaatatgaatacggctccatcaagacccagccccacacgaagctcgcgtgtcattgggagccttcagagcaggaggagggccccagggtcgagctggtgtgtacctgccatgttgctctgcagcaggcagcagagatttgactcttcgttgcaaattgctgccggtccagatgctaagccaggtttgcgggaagagctgcttgagagctgctgctgtgcctgtgctgcanaccccgcgtgctcgcatgtttgggttacttgtttgaagggaaataaaaagggcaaaacactccaaaaaaaaaaa

SEQ ID NO: 1427 - DNA, 130 bp, Homo sapiens
  misc_feature (1)...(130): n = A,T,C or G
gtgtccaccacccacagcccagcggcctgcagcgatcntgacctnatctgccccactganccacngaataangnanccnnccctactctcttgaataccatcaataaagttcgctgcacccaaagaaaaa

SEQ ID NO: 1428 - DNA, 215 bp, Homo sapiens
  misc_feature (1)...(215): n = A,T,C or G
gcctccaggtatgaaatccaaacagatgtgcatagacnggatccctgcgactgtcagaggcagaagttcacatggataaccctgtctcaggaggaaaaggagacgtcaaggacaganggagtggaaagcgaagcttcacttcctttctagagaatctgctncaancaccaatatatatgtaaatgtgtcantnatngaactttcctgacaaatta

SEQ ID NO: 1429 - DNA, 121 bp, Homo sapiens
  misc_feature (1)...(121): n = A,T,C or G
tgccgttcttttgttcttctccgtgaaaaactgtgtccgnagtgacaaagagacagtgtccgtttgttcatntgtgacatcagagnagcgtactgtagcacatcncgagagacagatgaga

SEQ ID NO: 1430 - DNA, 207 bp, Homo sapiens
  misc_feature (1)...(207): n = A,T,C or G
ggaactctcaaaggtcngacacgcgaagnatggcatgcttncatataaangncatctnnannnaagttcaccctntcggtnnntgcagggtgactcagggggcctggctgctgcttgtctggctttgttgaagagggattggggaagcagggttgtggntcctattttctcccacccntncaagcccncggcaaggtctttgtcgaa

SEQ ID NO: 1431 - DNA, 391 bp, Homo sapiens
  misc_feature (1)...(391): n = A,T,C or G
gactgagtccagcccaaagagtaaacnaganaagcttggagaagcccctcgccctgggngggtgctctttgactttgnctnnganccgatgacccaccanaacccactgctggagacaaacagccgctccccggggctgaagggtactgttggaggtcatcgaacaagcaagattatgaggtttgttgataagatcaccaaatcaaaatatttccaaaaagcaacagagacagaattcattaaaaagaagatcgaagaagtctctaatacaccagctgcctgaggaaaagctttggaggagtcaaaaggcaaagggaagccttctagttgtacagctttgctctgaatgtgctcatttgnttgtccgtgagatgccaggacttggaaggtg

SEQ ID NO: 1432 - DNA, 260 bp, Homo sapiens
  misc_feature (1)...(260): n = A,T,C or G
ctcctgccaatgtggctnactgcatgcattangngctttggatgacctganctctggncnacctgnanccacatggtagnnaggctgctgacttggagagatggtgacaagattgagtctgtctggatgatagcatcctgtgccacctactgatgactggttggtgtgggaagccacatgtgccgttgcagagtggtactgactactgctggccaccacgcataagattggacaaacaaccaatgtgtacatatgcagta

SEQ ID NO: 1433 - DNA, 246 bp, Homo sapiens
  misc_feature (1)...(246): n = A,T,C or G
gtggggagcgtggattcttctacacacccatgtcccgccgcgaagtggaggacccacaagttctgaagatgaactggatgtgcttttacatggaaccccagaccaaaagcgaaaactcatccgggaatgtcttactggagaaagtgagtcatcaagtgaagatgaatttgaaaaagaaatggnggctgaactaaactccaccatgaagacaatggaggaccagttatcctcactgggaacagggca

SEQ ID NO: 1434 - DNA, 535 bp, Homo sapiens
  misc_feature (1)...(535): n = A,T,C or G
cacctccagaaattgagggagaantanngcgagacttcatggntgcgctggaggcagagccctatgatgacatcgtgggagaaactgtggagaaaactgagtttattcctctcctggatggagatgacgaaaaccgggaactcagagnccaaaaagaaaccctgcttagacactatncaggnngaangttccnatcttctagaccaacgctcctanccatgggtgatcanggaatggaggggaataacactgcngggtctccaactgacttccttgaanagagantggactatccggattatcagancagncagaactggccagaagatgcaagcttttgtttccagcctcagcaagtgttagatactgaccaggctgagccctttaacgagcaccgtgatgatggtttggcagatctgctctttgnctccagtggacccacgaaccgcttctgcattttacagangcgagacaattcttcngaaagacngntncngnnnaattctacataagaaaatctgcttttgggggctgg

SEQ ID NO: 1435 - DNA, 597 bp, Homo sapiens
  misc_feature (1)...(597): n = A,T,C or G
gacatcaatgcttacaatggtgaaacacccacggaaaagttgccatttcccatcattgatgataagggcagggaccttgccatccttttgggcatgttggatccagtcgagaaggacgataacaacatgcctgtgacggcccgtgtggtgttcatttttggccctgacaagaaactgaagctgtctatcctctaccctgccaccacgggcaggaactttgatgagattctcagagtggttgactctctccagctgacaggcacaaagccggttgccaccccagttgactggaagaagggagagagcgtgatggtagttcccaccctctccgaagaggaagccaaacaatgtttccctaaaggagtcttcaccaaagagctcccgtctggcaaaaaatacctccgttatacaccccagccttaagtctttgcggaaattggggctgcatctgcacatccagtactggggcctgaggatgtcagctggcagcccgtgggtccttgcancangtccgtagaaagatcgtggcatgatcacaagccggcctgtagatcgctcgctatactactgggcattaaatggaaatggccccaaaaa

SEQ ID NO: 1436 - DNA, 203 bp, Homo sapiens
  misc_feature (1)...(203): n = A,T,C or G
ccggccaccggcggctgtagaagaagcctcaccgcctaccgtaccggcaccgngnttgctgngcgagatncggccgctaccagaagtcgaccgagctgctgatccgcaagctgccgttccancgcctggtgcgcgagatcgcgcaggacttnangaccgacctgcggcttccagagctcggngtgtnatggctctgcaggaag

SEQ ID NO: 1437 - DNA, 125 bp, Homo sapiens
  misc_feature (1)...(125): n = A,T,C or G
aaggagagacaagggccttnctgaggcagnacaaggacccannanctacccagtaatgcannagggcggncccnnacgactganctctgatcctaacctgcaaagtgaagtttcaatttccactt

SEQ ID NO: 1438 - DNA, 137 bp, Homo sapiens
  misc_feature (1)...(137): n = A,T,C or G
cagtggtcttagttttgaggagcatctatacaaaatgcatatacaantggttttagcataaacatnggagaaaagcgtctacactganacataagagaagttgttactgaacatgtnataaataaggtgcaagaaga

SEQ ID NO: 1439 - DNA, 360 bp, Homo sapiens
  misc_feature (1)...(360): n = A,T,C or G
gtgtatgatgaaaaagatacagggagggttcgttttgtagatcgtcagaaagaggtgaatgagaatttgccattgatttgatagcacaacagcctgtgaatgaggtggagcaccgcatcataacctgcgatggaggcggtggtgccctgggccaccccaaggtgtncntaaacttggacaaagaaacgaaaacggggacatgtggctactgcggnctgcatttcaancagnagcatcactagtgtgggntgtgtcctggtcctctgactcctatggaacatctccacgctgggtgttctgtgtgaggccactgctctgtgaatggtgtcccttgttttgaataaaggatgctcccaccat

SEQ ID NO: 1440 - DNA, 348 bp, Homo sapiens
  misc_feature (1)...(348): n = A,T,C or G
tccccaccttgcatcatggaanaaaatgggtggacccgaaaaatccaccatgggctactnagggtncagccactgcggtntcacaaccagatgcactaggggttcancagcnatcacttntgggagcatctcctaccatttatacccagcagactgcattggcggnggcaggccttacccacaaacgccancnnactntcaggnaacacaaactgcggnactgcagcaacaagctgcagctgtnttacagcancaatattcacaacctcagcaggccttgtatagtgtgcagcagcagttgcaacaacctcagcagaccattttaacacagaatacgaggctagggaa

SEQ ID NO: 1441 - DNA, 310 bp, Homo sapiens
  misc_feature (1)...(310): n = A,T,C or G
taagttccctccagggcntctgcactagnactgcagtgtgctccacatacatcactgtaggcctgacctcctaacttgagataaccggaaccaagttcctgggatgcagttgcatttccaacgtgatccactggggcatcaagagcanaggatgactggagagtgagggtcgctgtattcccagctcctggctgagggcctctccagccccaagagttgtcctggaagtagattngctgtctccatggacatgtgancaatgggaaaaagaagcatacattcagnantactgacaggaagaggacaagca

SEQ ID NO: 1442 - DNA, 271 bp, Homo sapiens
  misc_feature (1)...(271): n = A,T,C or G
actgagggagatctctggcnacctgnnagtcacatttcatggttgtgctcatcccttccgggtccaggtacagagacgatgctgccacagtncgcgagcacaagtaattnaaagggccagggagtcggcaacaagaactggnaggagtnatcatcttaagttagaagaagcagatcaaacaagtcttatgataaaaactttattgtcttaaatatcaaaggttttacacatcacgttttcttcagaaagttcctattaaagaagaaaaata

SEQ ID NO: 1443 - DNA, 389 bp, Homo sapiens
  misc_feature (1)...(389): n = A,T,C or G
acaggccataattacttnttggggaactctcaatagggcgnacaggaatcatggctggttccatacaagaagcccgtgcccaancatgtgatgaagggaaagcggggggtggtgtggcccttaccantggcaccatccgagnggccatggnggaaaanaatggagagcgtgtcctcatggaggggaagctcactcacaanatcaacaccganagctccctctggaccttgaccccggcaggtgtgttttggtgaatctgancaaggttggcgagtactggtggagtgcccatcctggagggggaaaagcccatcgacntcgacaanatcaacaagggagccctccatggctactgnggatgaagaggaacangcattcctggacaaaac

SEQ ID NO: 1444 - DNA, 317 bp, Homo sapiens
  misc_feature (1)...(317): n = A,T,C or G
aaagagagcacctgtgaggactgngtnaagagcnaacccaagggggattctgaccatttcttcccgcttccagccatggaggagggggcanccattcttgtcaccacaaaaacgggtgactacggcaagtcaagtgtgccaactgctttgcaaagtgtcatggggatggagaagccaactcacactagataatgagcttcctaactggtgtgaagctgctttgagaaccttctgtcaggagagctggtgttttagatgtcgttaggatgaccgtttaccaaccaagaatacagttttttgtcctttaaaaaaaaaaa

SEQ ID NO: 1445 - DNA, 213 bp, Homo sapiens
  misc_feature (1)...(213): n = A,T,C or G
actgaggctcaaaggaatgactcaattccaagtctttccacaaacctctcagcaaacactccaacttantgaggcgcagcactggctcacatntagcattccancattctggagatggagagaagagagtccaaaggtttgaccccagnctcggcctcaggcccgagtacaaaggacagccttaccanaccaataaagctcacacgatgaaaa

SEQ ID NO: 1446 - DNA, 621 bp, Homo sapiens
  misc_feature (1)...(621): n = A,T,C or G
tacttattgtggaactatnacaggacagacatnattgaannagttattaccntgtagagngtcncnctgntntncgctgcgaccttgatcttntttcacttgtacaagaacaaaggcagctacgtnacctatgancctgcagaaggggagcccancgccatcctncanatggagactgactcagccaagggcagagagaaggaagagtacttcatctaatgcttcccaggctggaggggccaattcttggctccaacactaagccgctgcctctgtagttagggaacgtttgctctaaagccagggagtggcgttgggtgatacaggcacatccactcacctcccaggacacagcccccaataccggcatcactgactccagggtccagagacatggagaaagctgttcatgatgctgggccttgataaggacagtgctcgaaaccgaccaccaaagaggggccatgcctgagttggaagtgaggtcacatgctggtccactttgncccctccctattnacgaccaatagccccagtcagngctatncagncttttctggaggcaggacaccncagggagggggtcggacccagggnagggganagggagtctgaaaaagg

SEQ ID NO: 1447 - DNA, 431 bp, Homo sapiens
  misc_feature (1)...(431): n = A,T,C or G
ctgagcatccagcgagcagccttggtggttctggaaaattactacaaaggacttcaccatctataacccgaacctcctaacagcatccaaattccgagcagccaagcacatggctggcctgaaagtctacaatgtagatgggcctantantaacgccactggtcagtcccgagccatgattgctgcagcagctcggcgcagagactccagccacaacgagntgnattatgaagaggccgaacacgaacgcagggtgaagaagcgganagcaagactggtagtggctgnggaggaagccttcatccatatccancgtctccaggctgaggagcaacanaagtctcctggagaggtgatggaccccagagaggcagcccaggccatcttcccttcatgggcnggggcacttgagaantaccttggggcaccca

SEQ ID NO: 1448 - DNA, 279 bp, Homo sapiens
  misc_feature (1)...(279): n = A,T,C or G
gactgaggtggttattggtggcagaataaatacttaatcaatggagtgaatgccaacaacaccanaagtccaagatctcttttgttctgtgggcctgaatgttaacaaccctcactttctcatcatgcagggcagaattaccgaaagtattaaatatgaaaccaccagagatattatccatgattgaagaagctgctggaaccaggatgtatgagtacaaaaaaatagccgcccagaaaactatagaaaaaaaggaggctaagctgaaagaaataaaaa

SEQ ID NO: 1449 - DNA, 774 bp, Homo sapiens
  misc_feature (1)...(774): n = A,T,C or G
actgaatgactgcctggaggagtcacagtcggatatcagcctcgagctccctctgagccaggagacattttcaggcttatggaaactacttcctccagaagatatcctgccatcacctcactgcatggacgatctgttgctgccccaggatgttgaggagttttttgaaggcccaagtgaagccctccgagtgtcaggagctcctgcagcacaggaccctgtcaccgagacccctgggccagtggcccctgccccagccactccatggcccctgtcatcttttgtcccttctcaaaaaacttaccagggcaactatggcttccacctgggcttcctgcagtctgggacagccaagtctgttatgtgcacgtactctcctcccctcaataagctattctgccagctggcgaagacgtgccctgtgcagttgtgggtcagcgccacacctccagctgggagccgtgtccgcgccatggccatctacaagaagtcacagcacatgacggaggtcgtgagacgctgccccaccatgagcgctgctccgatggtgatggcctggcttcttcccagcatcttatncgggtggaangaaatttgattcccagtatctggaaagacaggcagacttttcgncacaccgtggtggaccttatgagccacccgangccggttntgagtatccaccattcactacaagtncatgtgnataactcctgcatggggggcatgaaccgccgactatcttacatcntaccctggaaaattcaggggaac

SEQ ID NO: 1450 - DNA, 279 bp, Homo sapiens
  misc_feature (1)...(279): n = A,T,C or G
agctgttccaccatactcctcttnccccaatccttaccagacggctgtgtacccagtgagaagtgcctacccccagcagagtccatacgcccagcaaggcacgtactacacacaacctctgtatgcagcacctcctcacgtcattcaccacaccacggnggtgcagcccaatggcatgccagcaacagtctaccctgctcccatccccttnntnctagagncngcggggtcaccatgggngatggctgctgggaccacgatggccatgtcagcaggtac

SEQ ID NO: 1451 - DNA, 485 bp, Homo sapiens
  misc_feature (1)...(485): n = A,T,C or G
ctgaagcccccgggtggagatngnncgatctttttggaagtccataagaaggtatttcttcaagcangcctaataggatggcatctaatattttcggaccaactgaagaacctaaaaacatacccaagaggacaaatcctccaggaggcaaaggaagtgggatctttgatgaatcgactcctgtgcaaactcgacaacgtttgaatccacccggggggaagaccagtgacatatttgggtccccagtcactgccactgcgcctctggcacacccaaacaagcccaaggatcatgttttgntgtgtgaaggtgaanactctaagtctgacctgnaggctgcancagactccacacccagaggagagcagagtgacaaaggaagctcaaaagaagtagagcatgcnaagataccggagcccacacctacagttgacagtcatgaacccagactggggccacgacctcgctcccacaacaaagtcctg

SEQ ID NO: 1452 - DNA, 464 bp, Homo sapiens
  misc_feature (1)...(464): n = A,T,C or G
tgggcctacaaatcatatggctcncactcctgaccnanngcncagcccccantcccaccctgagatttgtggctgtgggcgactggggaggggtccccaatgccccattccacacagcccgggaaatggccaatgccaaagagatcgccagaaccgtgcagacgatgggcgctgacttcatcatgtctctgggggacaatttctacttcactggagtgcacgatgccagcgacaagaggttccaggagacctttgaggacgtgttctctgaccgtgcccttcgcaacatcccctggtatgtgctggctggaaaccatgatcaccttggcaacgtctctgcacagattgcatactctaagatctccaagcgctggaacttccccagcccttactaccgtttgcgcttnaaaattccacgtacaaacataactgtggccatntttatgctggacacagtgatgctg

SEQ ID NO: 1453 - DNA, 395 bp, Homo sapiens
  misc_feature (1)...(395): n = A,T,C or G
cctgacaatgagaaaagctctagaagcagnccaaagcatatacaactcattntctngctnnagtgggtnatgaagatagatgnanttncctcgcacantnngcncnaactnctggtatntncangcntcnnaantgnggaggagggcgtcntncatcaatcacatctcacaggtaccagcttgcaaagacttctgggttcatttttagtcaaatagcagcatgtgtcttaagcatagtcatgcattgcttagtgaggaggatacatatctgctaagaaatgtcactaggagatgttactgtggtgtagagagcacctacatagnctgcatggtatataagtntacccactatttcctatggatattgttaagagngggaaatgcaaggtgcatga

SEQ ID NO: 1454 - DNA, 470 bp, Homo sapiens
  misc_feature (1)...(470): n = A,T,C or G
acatccattcccggctacctgaacccttccagtaggacggaaatcctgcatttcatagacaaggcaaagcggtcccaccagcttcctgggcacctgactcaggagcacgatgctgtgctcagtctgtctgcctacaatgtcaagttggcctggagggacggggaggacattatcctcagggtgcccatccacngatatcgctgctgtctcctatgtcccgagatgatgctgcacacctggtggtcctgaagacagcccaggacccaggcatctctcccagccagagtctgtgtgcagaaagttctagaggcctcagcgcaggttccttgtcagaaagtgcagtggggcccagtagaggcatgttgcctggtcatcatggccncagagagcaaggtcgccgcttgaagagctgtgctccctgctcagccnggtcttccagatttgtttacacggagtccaccatcgacttt

SEQ ID NO: 1455 - DNA, 489 bp, Homo sapiens
tgaggtcctgcccaccaagccatgtcttctaggcagcacctgggctctgctccgcctccctctaccactgatcaggatatgctctgggaagtgggggctcaggcttcaggagaagccagcactgctcttcccaggaatggctgccagcacagtacaggtggcaggcaggaaggactaccctgctctgctccccctgaatgagagtgagctcgaagaacagttcgtgaaaggacatggcccagggggccaggccaccaacaagaccagcaattgtgtagtgctcaaacacgtgccctccggcattgtggtcaagtgccaccaaacaagatctgtggatcaaaacaggaagatagctcggaaagtcctccaggagaaagtggatgttttctacaatggtgaaaacagccccgttcacaaagagaagctcgaggctgagaggagaaagcgagagaggaagaaaagagcaaaggagactctagaaaaaaaaaa

SEQ ID NO: 1456 - DNA, 496 bp, Homo sapiens
  misc_feature (1)...(496): n = A,T,C or G
gactgaggacagtgtctacgtatatgtaccaaggntccaaggangtagatgnccttgtggctggaggcctcaatgcctgatgtttctcctgattctgcaacggagttgtggaagacagaacctcaagatgcaggagaccagggaggcaacacttgcatcctcagggaggaagccaggatgccccagtcaactggggttgctttagggatagggttggagtcagcagagcctacagccctgctccccagggcagagaccctcccagagccgacagagcttcgtccacaaaagcggaaaaagggcccagcccccaaaatgctggggaacgagctgtgcagtgtctgtggggacaaagcctctggcttccattacaacgtgctgagctgcgagggctgcaagggattcttccgccgcagtgtcatcaagggagcacgctatgtctgccacagcggtggccactgccccatggacacctacatgcggcggaaatgccagg

SEQ ID NO: 1457 - DNA, 378 bp, Homo sapiens
  misc_feature (1)...(378): n = A,T,C or G
agcaaagtcggcctcaaaaacagagaaggcaagatggcttctgaatcagaaactttgaaccccagagctcgggtcntnanctntatnnnnancatnnnanngcctaggnccgtnatcanngtnngtgagannnccttgnatcttgagnagattanntgcccnnatactagacaagggccagggctcaggaagnnngagnggntggnncatggctagcaanggatgagggtgatctagtcatccctgcgcccatccagcagctggtgactggacagtctggcctcttcactcagtacaacatacagaagaaagccattgaccgttcgtgagttccgcaagatcgccaatagctgacaatgcactggtgttttatctgct

SEQ ID NO: 1458 - DNA, 385 bp, Homo sapiens
  misc_feature (1)...(385): n = A,T,C or G
ctgtatatgggcttgcctggcccacccgagcagacttcgcagactctggagaggccctaatgtcacantnctgactggtctcaccagaggcaactctngaatnttttaccgagaggtgctgccaatccagcaggcatgcagggcagaagtcgtgtttctccatggaaaagcatttaattcccacacatgggaacagctggggacattgcagctactgtcagagaggggctaccgggctgtggccatcgaccttccaggtnntgggaactcagccccttcagaggaggngagcacagaggcaggccgagtggagtagctggagagagtgttccaggacctacaggtgcaaaatactgngntggtgagcccctcactgagtggcaag

SEQ ID NO: 1459 - DNA, 491 bp, Homo sapiens
tgaggccttgtacagctccatcaagaatgaaaaattgcaatgggccatagacgaggaggagctgcgacggtctctgtccgagttggccgatcctaaccccaaggtcatcaagcgggtcagcggaggcagtggcagcagttccagccccttcctggacctgactcctgagcccggggcagctgtctacaagcacggggccctggtgcgaaaggtgcacgcagaccctgactgcaggaagacacctcgtggcaagcggggctggaagagcttccacgggatcctcaagggcatgatcctctacctgcagaaggaggagtatcagcctgggaaggctctttccgaggcagagctgaagaatgctatcagcatccaccacgccctggctacccgcgccagcgattatagcaagagaccacacgtcttctacctgcgcacagctgactggcgggtcttcctcttccaggctccgagcctggagcaaatgcagtcct

SEQ ID NO: 1460 - DNA, 346 bp, Homo sapiens
  misc_feature (1)...(346): n = A,T,C or G
tcaatgagaagacagnactctgcacttggctgtgcattcacccccaagtgtatggaagccatntngaagcagctnctcaattctcctgccatgtctctctgttcaggatgttcctgccactgaacccgagcctggcatccagcaagcgctagccaagagcttagcagtgaccacttgtctactcatcgggggacggccatcagcctggaggtgaaccagggagagtcttgactataggcacggccccagcatcagtgggatcttgggggagactttgaccatcagcagaggaggtttggggggacaatgttattaaaataaaatgacccttgccaagaaaaaaaaa

SEQ ID NO: 1461 - DNA, 177 bp, Homo sapiens
  misc_feature (1)...(177): n = A,T,C or G
aaggctgacaagcaccanatggnaaaggcagngaagaaactctatggcattgatanggccaaaggcgtacgtttagcaggcttctgactatgacactctgactgngacaagaatattgggatcatctaaacngagtccagctggataattntaaatatacttttccccctacaataa

SEQ ID NO: 1462 - DNA, 230 bp, Homo sapiens
actgaggatatgctgtcattctgggctgtcgtaatatatttctctgcagaagagtgggaatacctgggtcctgctcagtggaaattatacagggatgtgacattggagaattacaacaactttgtttttctggatcttgtttcctctacgccatacctggtcagatttctggagcaaatacaagagccttcagatgtgaagagtcaagcagacatctctatgtactcagg

SEQ ID NO: 1463 - DNA, 328 bp, Homo sapiens
  misc_feature (1)...(328): n = A,T,C or G
tgacaccatcaaaaccaaccctgatgacagaagaatcatcatgtgtgcctggaacccaaaagatcttcccctgatggcactgcctccttgccatgccctctgtcagttctatgtggtgaatggggaactgtcttgccagctttaccagaggtcaggagatatgggtctgggcgtgcccttcaacattgccngctatgctctgctcacctacatgattgcacatatcacaggcctgcagccaggtgattttgtccacactttgggagatgcacatatntaccngantcatatagagnnggtgaaaattcagntacagcgagaaccaaga

SEQ ID NO: 1464 - DNA, 385 bp, Homo sapiens
  misc_feature (1)...(385): n = A,T,C or G
actgaggtggagtctttcctgctagaagaagaaggacaaggtgctgnagaaggncgnccggatagnactgaagaaagaagtagtggaggaggaggagaatggagctgnggaagangaatacgaaactgcactggatggagaggatgntgatnaaggnnntgaagacnatgatncagctangcggcgctctnntcatgnccccctgcccttgggcttgtgttttggntttcccttcnngtnctggnggtggnccgggancacacacatcccgccccctttctcctgtctccctgctctggccctnccccagagctgtgacccttgtcctttgacccancctctcntttccatctctccttcnctgctccttccccttctgcctccg

SEQ ID NO: 1465 - DNA, 185 bp, Homo sapiens
  misc_feature (1)...(185): n = A,T,C or G
catgaggaattggaaaactcttctgaggattacctntccagcctaaggtgtggggaccctgaacatccagagngcttttctagnctcaacattacgntgnggcactttaccttgganggtnagcaggnggnccnttgtatganattgtgaaaacctcntgaaccttctagcagaggtggctcgaa

SEQ ID NO: 1466 - DNA, 472 bp, Homo sapiens
cttgcttggctcgtccaggtgccaacaggaccctggttctgcaggaaatgtgaatctcaggagcgtgcagccagggtgaggtgtgagctgtgcccgcacaaagatggggcattgaagaggactgacaatggaggctgggcccatgtggtgtgcgccctctacatcccggaggtgcagttcgccaacgtgctcacgatggagcccatcgttctgcagtacgtgcctcatgatcgcttcaacaagacctgttacatctgtgaggaacagggccgggagagcaaagctgcctcgggagcctgcatgacctgtaaccgccacggatgccgacaagctttccatgtcacctgtgcccagatggctggcctgctgtgtgaggaagaagtcctggaggtggacaacggtcaagtactgcggctactgcaaataccactttcagcaagatgaagacattcccggccacttccagcggggg

SEQ ID NO: 1467 - DNA, 863 bp, Homo sapiens
  misc_feature (1)...(863): n = A,T,C or G
gatctgagtgtggctctgtacaaacatttcctttcccctcgcgatggggagacctgctccggtgcatccagagaactccgcatcctctgctgtgatatagatccagtccttgtggagagggctgaaagagactgtcccttccctgaggctttgacctttatcaccctggacatcatggatcaagagagcaggaaggttcccttgagttctttcttgagccagtttgggcgttccgtttttgacatggtcttctgcatgtcagtaaccatgtggattcatctgaaccacggggaccgtggtctgtgcgagttcctggcccacgtctcctctctctgcagctacctcctcgtggagccacaaccctggaagtgttaccgggcagctgcaaggcgcctgcgcaagctgggactccacagttttgatcacttccgctcgctggccatccgaggtgacatggccaagcagatcgtgcggatcttgacgcaggaccacgggatggagttagcgtgctgtttcggcaacaccagttgggaccgaagccttctgctcttcagagcaaagcacacccacgagactangcaatccccgaatcgtcaacaaaaagagacacngacagattaagaatncgaaaggccacgggacacacaccagtaaagagatacccggggagcttttaacaccggagaaatcgagtttggatcccagagacatcaggcaagcctttganaactggcaaggggcttttggcnaaaatgtcttgaaaccaagccggcttgaaaagggcnccagtncccgggttncccctggttggntttggnaaaaaacttncccnccgggnaaatgaaattcccccgggggacaaa

SEQ ID NO: 1468 - DNA, 143 bp, Homo sapiens
  misc_feature (1)...(143): n = A,T,C or G
cagagactgaccagtgtggacgtgcggaacacagnagactcaccagtgtggattaggacgtgcctcttgaggtggtaactgctccgaaaggctccaaagcagtgttcacaaataaaatttttgggaatctttaaaaaaaaaaa

SEQ ID NO: 1469 - DNA, 250 bp, Homo sapiens
  misc_feature (1)...(250): n = A,T,C or G
aaaccttactggaacctcacaggttataggctacaccttgcnaaaaccattantatnngaaagactttgtcaaagntcaagaagaaatganaggnatcgtaagtnatcatagcgnatgagaaactctatnattttttctgagnggggggtanagcctttncattgtcccactcatctccaaagngactataagaagacnnntnggagataagancncatngaacattaaccaactgtgggtaaagcgctt

SEQ ID NO: 1470 - DNA, 399 bp, Homo sapiens
  misc_feature (1)...(399): n = A,T,C or G
atggaccgagccctctgcaatacaaccgctgtttggaaacttcatcttcttactgagcctggctgtctgctacatgctccctgtggagtggaacatccgcagacattttaaaggaacagctttgtgtcccaccanaggtgctgaggactgaacacatggactcatacatcatacatgggtaagctctcccatctatcacctagcttcaggtttgtcagccatctctccacatacacattaagcatntgaaataagacactgctgatattggatgatagcaaggttcagaagacctggcagaggatnttcgatgancttctgtcctcaaggaatcgantacaggacttctacttgcagaaaaggcaagaatggctnattagggaaaaaggatattcccaa

SEQ ID NO: 1471 - DNA, 323 bp, Homo sapiens
  misc_feature (1)...(323): n = A,T,C or G
atgaccgttttgatgaanatgacaaagatgattctgnctggntnttanaccatgattatttggaaaacatgnatgggatgntcaaganggtcantgccatanaaaggatagttgggtggtnccacacaggccccanttntgcacangaggggatatccgccatcaatgaactcatgaagagatnctgccccaactcantattggtcattatcnacgngaanccaanggacctangacttcccaccgaancctacatcctcagtgnaggaagctcatcgactatggnacgccaacgtcaatanacttttgagcatgtgactagc

SEQ ID NO: 1472 - DNA, 416 bp, Homo sapiens
  misc_feature (1)...(416): n = A,T,C or G
cccagtcacgttaaatgtaggtggacacttgtacaccgacatcgcttaccacagttgacacgctacccggattctatgcttggagctatgtttgggggtgacttccccacagcccgagaccctcaaggcaattacttcattgatcgagacggaccgctcttccgctatgtccttaacttcctacggacttcagaactgacactccccctggactttaaggagtttgatctgcttcggaaagaggctgatttctaccagatcgaacccttgattcagtgtctcaatgaccccaggcctctgtatcctatggatacttttgaagaagtcgtanagctgtctagcactcggaagctttctaaatattccaatccgggggccggcatcatcncccantttaaccattcacccccgaaagg

SEQ ID NO: 1473 - DNA, 317 bp, Homo sapiens
  misc_feature (1)...(317): n = A,T,C or G
gatgactgcctgcctttnaccttggagacngtgtacagctggnanctgnaagcctgggatgaggatctgcaggaggtcctgtcctcagatgaaattgggggcacctatatctcatccccaggaaacgaagaggaagaatcaaaaaccttcactactcttgaccctgcgtccctagcttggctgacagaggagccagggccaacagaggtcacacgcacatcccaaagccctcgctctccagattccagtcagagttctatggcccaggaggaagaggaggaagagcaaggaagaactaggaaacggtaaacagagtg

SEQ ID NO: 1474 - DNA, 235 bp, Homo sapiens
acacgaatagcatagtcatctggaagagaagaaacaccagtcactcccttcgaggagtctactgaggaagaaagagaacaggaggaggcggctgctctcaaaatccagtccctcttccggggacacgtggctagagaagaggtaaagaagatgaagtcagataagaatgagaatctgaaagaagaggcagacaatctgagaccacaggttttacacccccgaaacatgaaaagta

SEQ ID NO: 1475 - DNA, 355 bp, Homo sapiens
  misc_feature (1)...(355): n = A,T,C or G
acaacgttcgtgcggntcggtnaggggttgtgngctggccctatgacanggatgaatggccagtcaacaaaagtgagcatctttcctgtgctttcacattcttccttcatggagagagtaaccgtgtgcacaagtgtggagatagctcagcaccagccgatctatttgatcaacgaggacgggctgtaaactagatatttgtaatctttaccacttgggattgcttcctctcagagttcaccagaactttgaatttctctctctctctctcttttttaaatgggctgtttttactgcaggggcttttcttccctagaaacccaactctacgcagaaaaagtgaaaaggaaaaaaa

SEQ ID NO: 1476 - DNA, 120 bp, Homo sapiens
  misc_feature (1)...(120): n = A,T,C or G
ttggttccacgtacgtcagntctgctcattatcantgacggcggnatctgcgacgtgacacataccatagangccatcgtnagtgccttctcactgcccatgtactatcattattgtcgg

SEQ ID NO: 1477 - DNA, 265 bp, Homo sapiens
  misc_feature (1)...(265): n = A,T,C or G
gggagcagatggactatggactacagtttacctcctcgcgaaagttcctcagcatctctcctattgnactttacctcctggccagcttctacaccaagtncgatgctgctcacttcctcatcaacactgcctcgctgctcagcgtgctgctgcctnngctaccccagttccatggggtncgactctttggaatcaacaaatactaaanganggttggctagttctgcaggcattgagggaaggcactggaactaagatataatgt

SEQ ID NO: 1478 - DNA, 375 bp, Homo sapiens
gactgagcctccctgctggagagggagcaccccccccaccccccagggcctggagcctacctgccagcatcctgggagatggtaacagacacgtccagtcccagtgtggtcacccttttgcacacggcgtccatgtcgatgatggagtcgatgctctcgggaccatcctccacgcagcactgagagccggggcagaaccggcaattatccagtcctttgtaacccttgttgtgcccacatttttccagcgtcactgtggtggccatgcccgacaccccaacatgcactacgagctggggacaagagacaattgggggacggttagcaggagcagcacccacccatacatcgtgagatgccaggacttggaaggtg

SEQ ID NO: 1479 - DNA, 102 bp, Homo sapiens
acctagcagatgtcacacagacgataaatagcaaagatggaagtcttcatgccggaggcaatcctataagacagctgagttctgcagagctggagacagact

SEQ ID NO: 1480 - DNA, 498 bp, Homo sapiens
  misc_feature (1)...(498): n = A,T,C or G
ttcctctctcgttcaaatcctgttagtgcaatgatcaaantctgtngacccacatnatccgcctagtgtncaacgaggtgacnacactgacggnanacccacctgangggattananacttccgcaatgatgaggtatctncacagacctgcaggttaccatcgagggccctgatanggactncctatgctggaggtctgttccgtatgaaagctcctactggggaaggactnccctgcctccccacccaagggctacttcctgactaaaanattccacccaantggtgggcccccaattggccgagatcntgntgnccanatgtgcttcaannnagnggacctgngannggnnctgnaatctggggctttaccnaatatagtagcctnggttgcnccaatnaaangngnccttggtctggatncccaccccttaaaccccannaanttctggnannttcaattagaaangaagggcaaaggcccgccctttgccttt

SEQ ID NO: 1481 - DNA, 502 bp, Homo sapiens
  misc_feature (1)...(502): n = A,T,C or G
agactgagaatgctcgtgattcctgtcccttggattgtaaggtttatgtaggtaatcttggaaataatggaaacaagactgaattagaacgggcttttggctattatggaccactcagaagtgtgtgggttgctcgaaaccctcctggctttgctttcgtcgaatttgaggatccccgagatgctgctgatgctgtccgggaactagatggaagaacactgtgtggctgccgtgtaagagtggaactgtcgaatggtgaaaagagaagtcggaatcgtgggccgcctccctcttggggtcgtcgtcctcgagatgattaccgcaggaggagtcctccacctcggcgcagatccccaagaaggagaagcttttcccgaagccggagcaggtcactttctagagataggagaaaaaaaaggtctcttgtctcgtgagagaaatcacaagcccgctcgatccttctcttaggctcgnaacccatctanggccaatgaaagggaat

SEQ ID NO: 1482 - DNA, 556 bp, Homo sapiens
  misc_feature (1)...(556): n = A,T,C or G
tgccgctgttcctcctgctgagagccctgagctattcnanagatgacactgnntgcngctgtnggaccnccgcagccacnctctnncgcgtcggcnctccctccttggacngnnattntatgaataaacatcnnaaccagtactatcaggccagcggttcaaaacccggaaaagggatgaagaaaagaatttcnaacccacnctttncagggatacacttgtccaggggcttantnaacctggtgataaccttgaanctgtagccaaatttttggattctactggctcacnattagattaccgtcgctatgcaaacacactctttgatatcctggtggctggcagtatgcttgcccctggaggaacacncntnnacaatggtgacnaggaccaagatgaccanccactgtgtgttttcagcaaatgaaaatcatgaaaccatccgaaactatgctcaggtcttcaataaactcatcagggagatacaatttatttggaaaaggcatttgaanatgaaatgaaaaaacttctcctcttccttaaagcattttctgaa

SEQ ID NO: 1483 - DNA, 198 bp, Homo sapiens
  misc_feature (1)...(198): n = A,T,C or G
aacgacgaaacatcancagaactttattgagantggattctgagactanncatgacactgangaggcacngcaagtgactcctncaatgacnagntccangagatccatnngcaanaatctatgggngggccgggggccccagtccntttcatgcaggatntatctgcgactttcagaanntggggaggctgacattg

SEQ ID NO: 1484 - DNA, 446 bp, Homo sapiens
  misc_feature (1)...(446): n = A,T,C or G
agtctgagctttgacgacttcctggaccttctgagtcgttttcanngacanaggaaccccnnacatgangccncactatgncttncgnatcttngactnntnngacnatggacccntggacagagaagacctgagccntcttgagaatctgcctcacaggagagagggcgaggacactnggctaanacgcttctgagatgaacccagntgattagacaatnncctggaagagtaanacatctgacagggntgggaccatctatnttnccgaggtccaacatgtgatctcgcgctcaccagactttgccagntnctttaagatngtnctgtgatgtcttnnaagnnccaacatgcctggccaaggacctggccactgctgagatgtggccaaggttatgcctgcggtgncaggnccngtgccggcccagnctggagagggcgctgga

SEQ ID NO: 1485 - DNA, 354 bp, Homo sapiens
  misc_feature (1)...(354): n = A,T,C or G
ccccactgtttcagggatgtacacgatcggagacattgtccacagttgnngagtgcactgcccctgagcaggactgtgcgatnnactgtgctcanggtccccaaggctgctgggcnangaagncgnntcagaantnctaaggggactctggccaatgnnctagancaantnaagttnttttccaacgtntaaaaacacatanaanaccnccagcctatgncccncttctgctcccggatcacgtcctgtcggtaacattagccacagtccaaagatggcacagccaaggatggagccaagtctccacaccaaaatctatgatggcccacgtctgactcaagttaaaaaaaaaaa

SEQ ID NO: 1486 - DNA, 186 bp, Homo sapiens
  misc_feature (1)...(186): n = A,T,C or G
gttgccagtgttgctgattgngatacaagatngnaaggagccngggtnttncattgganaggctcttctccctggagcatcccggcttctatcttacaagatgcttgnatacagncttctgataaagatctggaacgcctttcnggntgctntataggagggaanttctgttatattggagaacac

SEQ ID NO: 1487 - DNA, 665 bp, Homo sapiens
  misc_feature (1)...(665): n = A,T,C or G
agcaagctgcacatggaagggttccgaagcctcaaggagggtgaggcggtggagttcacctttaagaagtctgccaagggtctggaatccatccgtgtcactggccctggtggtgtgttctgtattggaagtgagcggcggccaaaggggaagaacatgcagaagcgaagatccaaaggagacaggtgctacaactgcggtgggctagaccatcatgccaaggaatgcaagctgccaccccagcccaagaagtgccacttttgccaaagcatcaaccatatggtggcctcgtgtccactgaaggcccagcagggccccagttctcagggaaagcctgnctacttccngnaggaataggaagagatccacagccntgncctgctccnagaancccagaattgangcccaggagtcagggttattctttgctnatggggagtttaangaaagaggcatnaatctgnacagtgntnaangtgtnngtaanggtnggntttgcntggnntancnttngnctgncgagncntnnngccggncttcccaacgtcatcctgctttccttnaagntantgaaaggattaggcnaatggaactctacccnactnttnnctgaagcnagcgaagcttttntgngggaggaaccncccttgaaccccgaggctttt

SEQ ID NO: 1488 - DNA, 105 bp, Homo sapiens
  misc_feature (1)...(105): n = A,T,C or G
tagtctggaaccacgccgngggaggatctacagaaatattgctggcgcagacacatttccagttgtctgaggtggccaggacattactcccgtgcgccttaccca

SEQ ID NO: 1489 - DNA, 199 bp, Homo sapiens
  misc_feature (1)...(199): n = A,T,C or G
accatttttgatttttgtacccatataaagtctctgaaactcaagtcaaggaatcttctgaagacaaacaacagttttcctccaactggaccatgtaatttaaagctgaacggcagtcagcaagtactggttgancacagttatgcctttaggaaccctatggaggcgaaaaaaaggataattaaactagaaaaggaaa

SEQ ID NO: 1490 - DNA, 530 bp, Homo sapiens
  misc_feature (1)...(530): n = A,T,C or G
ggatcatgaagtgatatacagtcatnttcagggaccattanagggtnctatagaaccagctactccaactgaagtcgtcagcaatggggcacctctncagcctgnccctgctgaactggccaatagccaaggnggagcacatgttcagcctgcccctgntgaagtggtcagcagccaanatggactgnncactctacagcctctgncaccagcatncattgatttgacggaggaagtacagccctcagaagaaaatatggaggttgtcaatcctggaacttcagaggagcctagtcagggatctggtgctaacccaaccgccggagctgctagatccgtttcaatgaacaacttcatcagcnggctgcagaggcttcataacatgctggaattgctganacctccacctgcagaccacagtgtggggccantaanancaaggaggaggatggcacccattttgagggccagagctggagagtctcanaggcaagacaatggcaggtatgtgccacatacaccactatatg

SEQ ID NO: 1491 - DNA, 281 bp, Homo sapiens
  misc_feature (1)...(281): n = A,T,C or G
gaactgagagaagaaganaatgaggcnaagattgaaaatgtgcagcaaaacaggtttcatcaaaggaccagtgttcaaaggtgtngcttcaagtcgatttttgcccaataggcacgaagacaaaagttaatttggaggaacagggacggcaaaaggtgtcattcagcttcagttttacaaagaaaactttacagaatagatttctcacttgcgcttagcaatgaaaagcaaagtgattctccaaactccccagctccccctnttcaagtagactcaaaaaa

SEQ ID NO: 1492 - DNA, 353 bp, Homo sapiens
  misc_feature (1)...(353): n = A,T,C or G
tgagtttgtgagggactgcagtatggcttcatttccttggtgcgtttgtaaaatagttcacccattgaagaccatgaaggttctttccaatgctgccctgcttttgctggtgtcttgctcctggaagttgtgatgctaaagnnttatgatgtantgactgngatttcacctccaganttnngatgactctncgacattggnnngatnangcggnnnacttctangactgaaggccatggngtgtgtggatcatggtaaactcaccaanncaagtnatgccctngagatgatcctncttaaactngtcattgcactcttttgttgacncccagnctttgctgtattacattaaa

SEQ ID NO: 1493 - DNA, 448 bp, Homo sapiens
gactgagagatgttatgaacataaacagtatagaaatggattgaagttctgtaaacaaatcctttccaatcccaaatttgcagagcatggagaaaccctggctatgaaaggattaacagttgaactgtttgggaaaaaaggaagaagcttatgaattggttcgcagaggtttgagaaatgacttaaagagtcatgtgtgttggcatgtttatggccttcttcaaaggtcagacaagaagtatgatgaagccattaagtgctacagaaatgcactgaaatgggataaagacaatcttcagatcttaagagatctttccttactgcagattcaaatgcgagatcttgagggctatagggaaacaagataccagttgcttcagcttcggcctgcacagagagcatcatggattggttatgctattgcttaccatttattagaagactatga

SEQ ID NO: 1494 - DNA, 227 bp, Homo sapiens
  misc_feature (1)...(227): n = A,T,C or G
gaggcctcagcagttctacctgtcatcanatcaggagcatcagtgttgctgccgcgttgaatgagnatggctgcaaagctattctcatcaaatgatgtcccattcaccacagggaggtcttcaaaggggtttacagactggtctgaagacacagtgatgtactggacggccagccagagtgcagtgctgccttcgtgatntttcagctctaaatctaatctgaaata

SEQ ID NO: 1495 - DNA, 539 bp, Homo sapiens
  misc_feature (1)...(539): n = A,T,C or G
gaaagaagctgacgacagaagggctgaggacctgggcacnaccacttaccgaccacttcgtngnctggctgaaagancgttaccttcctgccaactaaagagcagaaatagtctacagataaggaaaactgaagtaaaatggcctcataatcaatncatcctttggtaccaagatatgtacacacggacagctctcagacggaatcctagctgcatagagtgctcatcctgccaaatnagcccaggctctgctcactagtgattccacacactagcaattccacatggtaggtcatcattgcccttnttgaactcaagtgcaagtgtaagtgtgagctcacctggctatgccatgtatcttactcataaacctcttcccatcgccctgaggccaactgcttatcacctcctgctgacttcctttcctcactattgcttccgtcggtcagtccctcttctgtcatcactgtttagcttatggactttgntgnngggagccgcgcccacatttcgncgntacaagatggcgctgacagctg

SEQ ID NO: 1496 - DNA, 135 bp, Homo sapiens
gactgagaggcttctcgagagacgaatgctgttctgtgcctgatgaaaggcttgaaactgacgagcggaaaagaaatttgttctattcttaaatggggacaaataaatgataaatatcttttctaaaaaaaaaaa

SEQ ID NO: 1497 - DNA, 486 bp, Homo sapiens
  misc_feature (1)...(486): n = A,T,C or G
caggtaggcctgccaaacgtatangtganccccctgtncanatgatgggnttcctgngagggagagnccggtgaccgacatgcctantgagcctggcactnatggtgctgaatcccggnctggntgcctgnggatcagcagacaattggggccgtgggcgagtctctggtacgcctcattaacgaccgaggagacggagaagggtacggattatggtttagggctagatgcagccgtangggccaccgtataccaggtcagaagccaaacgaaangtcaaacacccagcgggcaagctcgcgacgcgcctcagcaacgacaccgccaagntctcgtgggaggagcgcgactggcggcactctcgcggaaagtggaagctcccgcaagcaggcggggggcgtgaccgnaagaaggtgtatttcaaagtgggtaatagatggttttctcacccaataaaantgcaatttatcctcctaaaaaaaaaaa

SEQ ID NO: 1498 - DNA, 154 bp, Homo sapiens
  misc_feature (1)...(154): n = A,T,C or G
tgatttacccactgaggacccttagatcctgtggatacctganaattgattcatctgtntgtagctgaggcttggcacctgcaagctttncctctcctggcatttcaccaagcccccgagctcacagggctctggctcccctgaagtcctgggt

SEQ ID NO: 1499 - DNA, 375 bp, Homo sapiens
agaagtgtttctattttgagtgtcgaacacaacactcgaaagcggctcacaagcaggagcccggattagggtttagttttggtatgtgtccctccctttgacttgaaggtctgcctgggctgtgtctgtaacatgatgtctgttgatgagtggagcagacacctgcccacagttggctcctggtaactcccgtctgctggactgcgttgccttcttccgtatgctctcccgaaaactgcgttgccttcttctgtatgctctcccgaacactcaagtgttctcaggcggcctctatggtgtcctttctcttctttcccaaatggtagcccaaataaatgaatatatatgaatcgttttcaacctacaaaaaaaaaa

SEQ ID NO: 1500 - DNA, 153 bp, Homo sapiens
  misc_feature (1)...(153): n = A,T,C or G
gcctctgggatctcttcctccttcnngnagcggactgaccacagcaggatcttcttctcaaaatctgtgggcttgtgcagcnggcaccccgtgtctgtnagactctgtggggaaaacaggaatctggcttgagactttaatgctcaaatcaag

SEQ ID NO: 1501 - DNA, 239 bp, Homo sapiens
  misc_feature (1)...(239): n = A,T,C or G
aaaatgccataagtcctgtgccatnaagaatatgctngacctnctttgagaaaaccaacgagatgcgttctgaacttcaacaatcatgtccatgngtgctggctgcaacagatgagtgagcggctttcatncaccagtacccgcaccttggnggnntgaaacnnngatctggacagcattttncaaaggatcaagacactnnaggggaaactaatnccagncagcactccataggcctt

SEQ ID NO: 1502 - DNA, 174 bp, Homo sapiens
  misc_feature (1)...(174): n = A,T,C or G
gaaaagattgaggaagtgtttcacgtggaaccccaactacagagactcttttataggggcaaacagatggaggatggccacacactcttcgattatgatgtgcagcctcaatgacacaatccagctgctcgtgcgcngggnggntggcactgcctctcagtacaaaaaaacaaa

SEQ ID NO: 1503 - DNA, 245 bp, Homo sapiens
  misc_feature (1)...(245): n = A,T,C or G
cccgaacctgccaatnctactttggcttcagtggatggtcgaaaaggatcatcaagggcagtcctcgtttcttatgaagaggaagacagctcacaagcttgncttccaaggcgggctgtantcagatgccttccagatgcgtgaccantcngnggntctggaaagtggnaggntcgcggtggagtacaggcccacgggngangatntanatgccagaaagnaaagaagagctgcgagaatttaat

SEQ ID NO: 1504 - DNA, 176 bp, Homo sapiens
  misc_feature (1)...(176): n = A,T,C or G
tgcccactcactccattctcannacctctcttcctcatgnnnatgaatcaggatggnaagttctnagnctacatgctctagcatcatacctgnctgncagatgccgngctccctgncatgatgntcntgaactcaccctttaaaactgnaagccctcnataaagcctttcttctac

SEQ ID NO: 1505 - DNA, 399 bp, Homo sapiens
  misc_feature (1)...(399): n = A,T,C or G
cttgtctctgtgtagtagcccaaatcctaatctccagtgaaaccctccacatgcatgatcttggtctccagcagctctggacactgcccgtcaccgacacctacctgatgtcaggactgtcccgactctggggaggtatgacatctttacgtggaagtcagttcccaaaggaactattcagaagctagctcactgaaggagaccaagaacaagctggagttgatcccctcactctgggtaaggtgcaccttggtttggtacactcacatggtgttcacagccatttacaactccagttncaaaggatctaacacccttttctgacctctctggncatcaggcatgcatgtggtgcacagacttacatgtaggcaagacacataaaataaaaatgaagag

SEQ ID NO: 1506 - DNA, 127 bp, Homo sapiens
  misc_feature (1)...(127): n = A,T,C or G
ccatccatgaaagctctgagacagagactgggtccangagtacattagcagccgnatngtntggangnggtcaganggtgtgntatattgaaggtnttcgganntattatatctagggggggggaga

SEQ ID NO: 1507 - DNA, 411 bp, Homo sapiens
gatgctgactgcagggatggaggaactttttccactgcagaagaacaatgtggtgcctatgggaacatgccatgtgaccattctccattcctcccagcaaggcacgctgggtgatgtgaagaacccaggaaggaaagctggaggagagcatggtgggtggcagagcgggatttggggaagccctgagccctgctccatctgaccctcagtacatctgtctccgtcactgtctacctgccctgctcacgcgtgcccctcactcaccccacggcaacaggcctatctttcccccaacatcaaaagagctatttcagcgactgtcgctgtacctggcccatagcctctagtctatatatgtctgtcaaatgaattggctataaacatgaaaaggtttctcctgaaaaaaaaaaa

SEQ ID NO: 1508 - DNA, 144 bp, Homo sapiens
  misc_feature (1)...(144): n = A,T,C or G
catatgagagcggagccttgcangnacctggattcagangaataccacnnccgctatggntctngncctgtattgggctgantacctgccagnatccacagaggtggttgtgncaccacagcaggacccaaaagacatgtattg

SEQ ID NO: 1509 - DNA, 244 bp, Homo sapiens
  misc_feature (1)...(244): n = A,T,C or G
catggcggcatacaancatgtggtancgagatctgacgccctcttgtggagngtctgaagtcaactacngttgtacttatgtataatantnaatnnttcttttnnanaaagttgacaaagaatcnctanagcagcctcggccatncacagacagnctcgcgtttttctcctactntgtgcttatgctnttaaatggcagactcgacggggcngnggtggcngcacgccttttaatccctgcact

SEQ ID NO: 1510 - DNA, 211 bp, Homo sapiens
  misc_feature (1)...(211): n = A,T,C or G
gaactgagatgacaacctgagaaagctaattttaaaaaatgatgccgggtagcaagcataatagtaacagaattgtgctgttttctggtatccccacccccatttgaacggcgtgttctcgatgtcgctacaagtttgttcaaatgacagatgnaactnaaaangctgttactgctattgatgaataacatactactctcaaaaaaaaaaa

SEQ ID NO: 1511 - DNA, 216 bp, Homo sapiens
  misc_feature (1)...(216): n = A,T,C or G
caccctcaaccactggtgataagccngntgtgttnccnccatctcaagacttgctctgcaatgtcggacacctcggccaagccttgattatcaaggagagactggaagataaacagaggtcaaaaagcccacttgattagggagtgaggatctggtaccactgcagctggtgaggagagagagcaagagatggaaaaangggagcttacctaagaa

SEQ ID NO: 1512 - DNA, 278 bp, Homo sapiens
  misc_feature (1)...(278): n = A,T,C or G
aagacttgtcggacgtggaggaaattgtcagcgtccgtggctncagcctggaggagaagctacgtagccagttataccagggggacttcgtgcatgctatggaaggcaaagattttaactatgagtaccgtacagagagaagctntcagggtccccctggtttttcgggacaaggatggactagggatcaagatgccagaccntgatttcacagtccgagacgtcaaactcctggtgggtaagtgccaagggccgggtaggagaagggaagggaggct

SEQ ID NO: 1513 - DNA, 178 bp, Homo sapiens
  misc_feature (1)...(178): n = A,T,C or G
cactggacacgagctcgcataatcagaaaggctttatccagaggacttctacactgatgatgatgaaggaatgttatcagacatgggcccagcctggagcngtgaagccggaacccagttacacagattnagncctnatganagtccaggtcngaaaagagttcccgtgccttacgct

SEQ ID NO: 1514 - DNA, 270 bp, Homo sapiens
  misc_feature (1)...(270): n = A,T,C or G
cggcccaccgtgcgccccagactgaanaagactgncanaaactatgaccaatcanngagcagcatcaacggacatctatccaatnggnacgtgctaggncggtacctacngaacaagacggncggnctcacctgtnttnctacggtgggattgagaggtanccgcatagtgcgacactagaacnanncaaaaggncgcagcacaagttacgcccactacggggtgtatgntgggaaagggcgcctgcgcagaggtgctctcctggatctg

SEQ ID NO: 1515 - DNA, 261 bp, Homo sapiens
  misc_feature (1)...(261): n = A,T,C or G
aatccggtacgaattttnagggctcatggcccggccggccgttcatcatcttgaggcaggttccacgagaggtttgacctcgactccaactataggaaaaacaacgactccaaacgccgtgaccgagctaccgtcctnctccgcgctctaggctgaagggcattccgacctgtcattntaggagacatnnaaaccctatgctgcctcaaactcaaacttgcagcaatcctcctgccttcagcttncccccacccaccgtgc

SEQ ID NO: 1516 - DNA, 407 bp, Homo sapiens
  misc_feature (1)...(407): n = A,T,C or G
ctgcggtggcacctgggccctggcngtctntacntattgtggaacnatnnctgngcaggcnntncgnggtacataacctgngtnaattccaatgcgcatgcngcaggtgttcctggaggcctatggcgggatgctngaaggagccgtacagcatngagcanngcnagngccnttcgggntacctatnggancatggagctggccattcctcactgggagccctgagaccnccatgtangcancnncaatggtctctacctgcggggcgggggagaatnnaggacnagctttgcctgcgttggancnnacagnataanagcagngctntgtgccattcgggctacctctcgggcatggagctgnccattcctcactgggagccctgataccaccatgtaagcatcacc

SEQ ID NO: 1517 - DNA, 196 bp, Homo sapiens
  misc_feature (1)...(196): n = A,T,C or G
gggttacggccatatggacanctcaagcgcctgctagaagcagccagttctggtgaggccacaggggactcagcatcctgacaacagcagttcacctttccaaaagggaaggtaactctgaagccgccattcacatccggacccacggtgctcctttcccttacaacggagccactttcccctccaaaaaaaaaaa

SEQ ID NO: 1518 - DNA, 268 bp, Homo sapiens
  misc_feature (1)...(268): n = A,T,C or G
actgagcccaggagactcattggaggaaggtgtatatccaagagcaaattgaccagaaggactcttccattactgaagctggncatggnactcatcaggagtgcaggttctttgtgaatcacccacgctccaggtgagatttttaatttgtatagttgcctataaactgcccaagggacttcctggtgatgtaactgcctttgagtcacccgtgtacctataagtggcctcaataaanncaatggttcaccaagctgaaaaaaaaaaa

SEQ ID NO: 1519 - DNA, 324 bp, Homo sapiens
cttctcacccatgaagggagggcatgtggggcaggaaccagagacctcctgcaggtcaagtgcagacacagagcaggtcaacttcctcagccaccctcagcacctagagaagccctagctccatgcaggacgaagagcctaactccccacctcatgcctgtcaccaagactggcctcttctctgtccttccaccttcttatgcaaggcagtggtgtctgctcagccctgggcgtactctgtcctcacaggccctgcactttagggccctggtgtcatgacctgtggaagaagaaggttgtagttggtagtttccagattcctgc

SEQ ID NO: 1520 - DNA, 298 bp, Homo sapiens
  misc_feature (1)...(298): n = A,T,C or G
tgaggtattatggctnaggtctgtctgttcctgancggctggaaaactgccgaantttgnnatcngtgnagcggnagtggcaggncttgntatgngcttanccaactgtntgntgagaagggacatgtcaccggaatanacatgactgangtccaggtccaagngtctaaaacctatnttgaacaccacatggaaaaatttnggtttccaggcacccaatgtgactttttctccacggncgcatcgagaagttgncagangctgggatccagagngagagctatgatattgtcatgtg

SEQ ID NO: 1521 - DNA, 215 bp, Homo sapiens
  misc_feature (1)...(215): n = A,T,C or G
actgccctttgagaataaaatgggaggccacaaccaaagtcttttggataaagcaccacaatggacaatgnaaggnagnctgccttactctnactncttnnnaaggcacaganctttgccattatggtaaagancctcanttctaatctgtttctctctgctctccttcccgagggacagaatctttaccagnntnggaaagacctccctaactc

SEQ ID NO: 1522 - DNA, 287 bp, Homo sapiens
  misc_feature (1)...(287): n = A,T,C or G
gctcgcattcaactgtgatgagcccatgtatgtcaagctggnggnggcactttntgctgagcaccngatcaacctgatacaaggttgatgacagacanntaaactaccgtgaatgggnaggcctctgtacantctnatcgangagggcnnaccacaggcaangtggttgnttgcnngtngccntanttggttaangactatggcanngantttcaggccanggatgtcatacgaggaatactncaagtgcnggaaataaataaatttttggctgaaaaagagaaaaa

SEQ ID NO: 1523 - DNA, 170 bp, Homo sapiens
gactgagttcctcgctgagcagtgctggatggcggcttcatctacttgatcatgctgcggcgcttcaagcagaaagcccacctgacttacaatggcaacagtggcaacagctcagaacccggagagacaccgaccttggagctgggtgaccagacttccaaaaaaaaaaa

SEQ ID NO: 1524 - DNA, 258 bp, Homo sapiens
  misc_feature (1)...(258): n = A,T,C or G
gactgagacgttcctctgctggagactggtgagcttcagggacatgccatcaaggaactaaagggagcattaagagactatgaaatgaangggcttgtncctacaggcatgaccgnaaactcctgctgnannaggccagagactttcgtngttntgtgaaaggaaactaantttaatnaaatnttgagncgnnctnncttcttgnaacatcctgattagcggcttgtacctactggcaataccggaaactcctgctga

SEQ ID NO: 1525 - DNA, 337 bp, Homo sapiens
aactgaggcaaacctgtacctgggactgctggtcatgtgtggctttgtcctctttgatactcagctcattattgagaaggctgaacacggagataaggattacatctggcactgcgttgacctcttcctagatttcgttaccctcttcaggaagctcatgttgatcctggccttcaatgagaaggacaagaagaaagaaaagaagtgaccaactggccgtcagcctttcccagctcaccttctcccccccacccccccacccctgtttctttgcacacatcacaggtgtcgtgttctatgataatgaaagcatcaggaaagcttttgtacttaaaag

SEQ ID NO: 1526 - DNA, 150 bp, Homo sapiens
  misc_feature (1)...(150): n = A,T,C or G
ggagaactttctacatttagagctgtgcaacagagaggagcaggctgtactcctgagaggtagtgagctgataanaagattccagacctgtggaaacctggatgtgaatagtatgatggcagaaatttttgattaaaaagtcattgtata

SEQ ID NO: 1527 - DNA, 119 bp, Homo sapiens
  misc_feature (1)...(119): n = A,T,C or G
cacctttgaaccctacggctgntttgnacatnttntgnatactaggtntgcccnctgancttgggcctcctctttttctcttaagtcttgctttctttccttnctctgcgaaatgagtt

SEQ ID NO: 1528 - DNA, 525 bp, Homo sapiens
  misc_feature (1)...(525): n = A,T,C or G
tgagatttgaaggatgcaccnttcggccaaggacagccttcttttcggaagactcccgattcaaagtggcgacagacggcaccatcacagtgaagcggcatctaaagctccacaagctggagaccagtttcctcgtccgcgcccgggactccagtcatagggagctgtctaccaaagtgacgctgaagtccatggggcaccaccatcaccggcaccatcaaccgctgaccccctctccaacatggttctgaccttcagtgccaaagaagatgcaattgcctttgcagaaaaaaaacggatggagctatgatgtggaagagaagaaggttccgaaacccaagtccaagtcttatggtgcaaacttttcttggaacaaaagaacaagagtgtctacaaaataggttggagctggctacatctctgcttgactgtgactgaagtgtcagctgtgcactatttatagtccatggataatgcacctcttaatctcctaataaatgtgacctttaaactacaaaaaaaaaa

SEQ ID NO: 1529 - DNA, 278 bp, Homo sapiens
  misc_feature (1)...(278): n = A,T,C or G
aagacagcagacccttgaaggacatgtcattgcacctttacgctctgngatgaccngncatactntcccttgccctgnttttcgagtcgntggaacccnagnnaganaantctatncnggagnaagaggataatgcanccccacggtgtgagtgctatnnatagattntacatcatanngaaatatactactgcatagctacgacgttacctanagcatacccatgaccattaacacctgttnatgnggacactccagngntattatcaactgccatt

SEQ ID NO: 1530 - DNA, 297 bp, Homo sapiens
  misc_feature (1)...(297): n = A,T,C or G
gaactgaggccctttgattgaatttaaacagtctnctagattgattctgcctcccaacaagaacaaactgaggaagtgatgagccacgtagccgntnacccttanagtnttagatgngcngatcccttcatgtatactttacagaaaaccagttaacccgggccgtggngggcncncnccnttttgncccacccnnntggaggcaaaggcaagccggnttntttcaaaggggggggccccctggttccacaaaggggtttcccaggaaaccccccgggnntttaaaaaaaaaccctt

SEQ ID NO: 1531 - DNA, 139 bp, Homo sapiens
  misc_feature (1)...(139): n = A,T,C or G
acaacttaatcacatgtncgcccgccnctcaccaaacctgnattgattttnangntggagcaagaggaagagccttgntgtggagnngagaganntgctgaggagaccctgnccagctcntgcttactgacctgcttga

SEQ ID NO: 1532 - DNA, 385 bp, Homo sapiens
  misc_feature (1)...(385): n = A,T,C or G
actgaggtgggagagcacacctgtacacctgggcacctgggctcctggacacctggacacctggacacctggacacctggacacctggacacctggacacctatacaaactccatacatacacatataccacagacagatgtgcaaagggttatgcacagtgacctggttagttttaactgtcaacttgacacagcctagagtcaactggagagttgcctagctttnncagagngactcacngatgtctggctngntattcaagtctcatgacacattaaggagctttcaaacagctgtagncgtgnacctaangaantggtgggnaatgctgannagctgaagtaattgaatcagagtannnatatttatcccttggagactcc

SEQ ID NO: 1533 - DNA, 288 bp, Homo sapiens
  misc_feature (1)...(288): n = A,T,C or G
acaatggatcacgttagacaacatgaatgancaaaaaatgaatgaacaaatgaagaaaacggcaaagacaagtggccagaaagggccgggcggaagagccctcgacagactgaccctaaagcaagacgaggcaaggccagtccagaataccagagtggaagctccccgtgtancatacaccatgcgggatgaaagtgagattagccccgagactgaggaagatggnttccctgacggatacctagagtgcatcatacgagttaaatgtgaatagttacaaaaaaaaaa

SEQ ID NO: 1534 - DNA, 180 bp, Homo sapiens
  misc_feature (1)...(180): n = A,T,C or G
gctgggaccagtgccaggcatgccttcaactccagcccagacctggcagaccacattcgctccatacatgtcgatggtcagcgtggaggggttggttttgccattctttttcactctttgnttggttgtttgattgnattatttataattgcaaataggattttttttcttcatgagaaa

SEQ ID NO: 1535 - DNA, 277 bp, Homo sapiens
  misc_feature (1)...(277): n = A,T,C or G
ggcaaaggccaagccgaggcaggagtggacttcactcacccacaggcacagccaggcatgatgatctggatgcccngtgaagangtgcatgctcttnggtctttanctggtgggggaagccagggtcagcgtntgcccttnttctnacaccccttnccccaccctagnttgacacgncaccaaagcttaataccctnctttacananggcacatnccggggtngtactttgggtngcnttgaacaggagccaanatnnggntcaaaaaagcttggat

SEQ ID NO: 1536 - DNA, 483 bp, Homo sapiens
  misc_feature (1)...(483): n = A,T,C or G
ggagagacatgtggacacgtagcccctatggcttctgcctgccagatcctccgctgggcccttgccctggggctgggcctcacattcaaggtcacgcatgccttcagatctcaagatgagctcctgtccagtttggagagctatgagattgccttnccaactngagtggaccacaacggggcaatgctggccttctctccacctgccttccggaggcagngtcggngtgcaggggctacaactgagtcccgnctattctacaaggtggccgcacccaagcactcacttcctgctgaacctgaccccgcanccccccgtctcctggcagggcacgtctcgggaggaatactgggacacgggaaggcctggcttggcagaaggctgcccgggcccactgnctatacgctggccaccttgcagggccaggctgggaagctcccatgtggccgncnagcancctgtggggggcctggtgagctgaag

SEQ ID NO: 1537 - DNA, 241 bp, Homo sapiens
  misc_feature (1)...(241): n = A,T,C or G
tgcccaccagtaatggaactcaccnaagnatacagncngtcctctcttgntcatggccangnngcaaganccaaggncaagcctgcatgncanatgccggtgttgcnnaaaccnancngtgcctngaggantgtcctacgngcatnangctgagagcaaagagaaccgaaagggactggccatgcaccccggggtcgtcaaaacaattangagagggcgataaatccttgaaaaaaaaaaa

SEQ ID NO: 1538 - DNA, 425 bp, Homo sapiens
  misc_feature (1)...(425): n = A,T,C or G
tgagagagcattaactatgccccccagctcctcggggccaccctggaggggagactcacacaatctaccttcacgctggagcaacccctgggccaattcaagaacgtcaacctctctgacccagatcccatctggctggtggtggctcacagtaacgagtgaaattcctggcgatgagtgccgagggacccgtggctgagacactgtggtccgaggagatctacctgcagcaagcccagacattccgagaagctccagggtcccagggnaagggcactgnggncatnattgccttcttgtcaatcctactgggcattctgcttgnggncnttctcgtactggtcatattccgcttgcatgannaacttnnnggnttcagnccacaaggancaagggggggatgctgcactattatccgccccaca

SEQ ID NO: 1539 - DNA, 267 bp, Homo sapiens
  misc_feature (1)...(267): n = A,T,C or G
actgagatgccttattggaggaattggaacgctgcacctttcaggacagtgaggnatattcaaatccagtttcttgtcanngggntnngnaatccacagaggagagcaagattccccaaactccaaagaccttgtcatcgcagggtaacacaagtcccttgaaggtnacatttgaactattgtagtgtngnagacaatcaagngngacaacatttctaaaaattgnattccacataggnntatattttgnaaattataaaaaaaaaa

SEQ ID NO: 1540 - DNA, 328 bp, Homo sapiens
  misc_feature (1)...(328): n = A,T,C or G
tgacagtaaggaacccgagactccatagaanagcccaccgcaggctntanatcctgcagtcagaggaagaaggtgggactgagtcccctggaactgagtcgctcanagtggggccttcagtanggnctcctatagtcaggagaggggcctgannatggtccagncagcacantanntgangctgccactttaccctggngaactgacccccatcctagcgccccacttccggatcccccgggctggcgagatattgaaccagancccctaaagtcagaggcacctactaaggtcggaggnagccattcaaagtaggatgccaaccctg

SEQ ID NO: 1541 - DNA, 274 bp, Homo sapiens
tgaagccctgacaagcatggaacttaccttggatatggagctggtatatctcaaggagaacttgccatgaccctcctgcctctgccttctgagtacacaaatgacgatggtctcgcttcacgacacccagtcagctttctctgccagaagcattcggaccaggaggagtgggttattttcccaggagatgttgcattcctgattgaacatgctggccttgagataagggcggccccgagataacagtttttaaaaaattcataaaaaggatgga

SEQ ID NO: 1542 - DNA, 297 bp, Homo sapiens
  misc_feature (1)...(297): n = A,T,C or G
cagcggtcaagatgtcgtcncntcatccgcacaggancttnccggacnngacgggactacacatgccgtccacctggtctcctgtccgtcgttcacanatacnttccccacngangagcacacacngtagacngcnggacngcntgtggtcannntgtctgtcggcgtcccnacggaacgggattggaaggacggactccacaaggtgcgctgtgtcaccgaggccgccaggatggagncactctnacgattctcaacaggggctagaccgcggtacagaaattgtcctcctcaata

SEQ ID NO: 1543 - DNA, 449 bp, Homo sapiens
  misc_feature (1)...(449): n = A,T,C or G
tgaggcaggtgcagtgaaggactatattaagatgctgcttcagaacgactcccttaaatttctggtctttgcgcaccatttaagtatgctccaggcttgcacagaagcagtcatcgaaagcaagtctcgttacatcaggatagatggaagngttccatcttcagaaagaattcatctggttaatcaatttcagaaggaccccgatactcgtgtggctatcctgagcattcaggctgctggccagggtttaacgtttactgctgcgagtcacgttgtctttgctgagttgtactgggaccctggacatatcaaacaagcagaagaccgagctcaccgaatcggacagngcagttctgngaatattcactaccttattgcaaatggnactctggacagcctaatgngggcaatgctgaatcgaaaggctcaggncacagggagcacactga

SEQ ID NO: 1544 - DNA, 337 bp, Homo sapiens
  misc_feature (1)...(337): n = A,T,C or G
ggaccacatggcatctgtgtttcgaagtgaggagatgtgtttatcccaagtgtttctccaggtggaggctgcgtattgctgtgtagctgagctgggagagcttggcttggttcagttcaaagatctaaatgcaaatgtgaacagcttccagaggaagtttgtgaatgaagtccgaaggtgtgagtcactggagagaatcctgcgttttctggaagatgagatgcngaacgagattttaatccaagtgcctgagaaggatgctgaagacccctctccctcgggaaatggatcaccctggagacgactctagagaagtttgcaaggagagcctgcagga

SEQ ID NO: 1545 - DNA, 180 bp, Homo sapiens
  misc_feature (1)...(180): n = A,T,C or G
ccccagactgaaggactgtgagcnngagagccacatcatctggacactccagggctacatagcggccctctanancgcaggaagctctcangagttcaaagacaggctgtgctacntnggaggatctgagatgactgggcttcttgagactttggctttaaaataaattagtagttactt

SEQ ID NO: 1546 - DNA, 166 bp, Homo sapiens
  misc_feature (1)...(166): n = A,T,C or G
tacagtgtgggccaaacactaatatgcataaatngangtnnattatgnggntggtctgggcatcaggtttancnttcatcaggagccccaggctcnacctaaccactnccttataccttccctcttccaggaaataaacttcatttcttaatgtcaaaaaaaaaaa

SEQ ID NO: 1547 - DNA, 162 bp, Homo sapiens
  misc_feature (1)...(162): n = A,T,C or G
gaagtaccgtgtagctgaagatgaccttgaacttctaatcctggctctgctccccatttctgggattataggcttgggccactacattccattaagagagnaggggattgaacctactactnnagannnnctnnaannttctttgaagacaggggctctctg

SEQ ID NO: 1548 - DNA, 196 bp, Homo sapiens
  misc_feature (1)...(196): n = A,T,C or G
tctgggtgtattttatataaccaaacatgtcatggtccttcacagcatacaaatagttttgacgttttaaataaaagtatccagcaaagacaaaggactcncannncnctacgctggtgcnngantctccacctggctcaaagtgaccacgcctgnctntttnatcgngngtgctctgcacttcttccccaccccc

SEQ ID NO: 1549 - DNA, 131 bp, Homo sapiens
  misc_feature (1)...(131): n = A,T,C or G
tatacccacgtgagtacctgaagnggaaggaagntaagcncncntgccctgagcnagatgntngagantatgaccnacaaccgnaacgtgatcactggagcccatttacccctgnggccagtccacatggt

SEQ ID NO: 1550 - DNA, 367 bp, Homo sapiens
  misc_feature (1)...(367): n = A,T,C or G
agagctcccccgccagaagacatgaanaancatancgactcggttaagggaaagcgccgagatgatgggctttctgctgccgcccgcaagcanagggactcggagatcatgcagcagaancagaaaaaggcaaacnagaagaaggaggaacccaagtagccttgtggcttcgtgtccaaccctcttgccctccggctgtgtgcctgnagccagtcccaccatgctcgagtttcttcctgtagtgctcacaggtcccagcaccgatggcattccctttgccctgagtctgcagcgggttccttttgtgcttccttcccctcaggtagcctctctccctctgggccactcctggggggtgaggggggtt

SEQ ID NO: 1551 - DNA, 422 bp, Homo sapiens
  misc_feature (1)...(422): n = A,T,C or G
gactgagaacagatacaacttcctggttcccctcctgtaaaatcgtggctgttgaatggcttagagttccgaagatgtgcgagcacacgatacccacccaggccaccagttctgttcctaggagtgtggatggtacctaatcctttcacagccttctggctgacattttctacacagtgaatgggagttgctttttttttccatgctgctttttctacgtctgagtttcttggacactttccagctgcacaccaaaacagcttccttgtttgtctanaccgtcggtaattgactcaagccgtcccccttggaagccatgcaccggactttccttgcattgcgtataanagtgcttgcgtagattcctagaagtggatgaaccagccaagcagctatgtncctggngcgatgttgatagctgt

SEQ ID NO: 1552 - DNA, 105 bp, Homo sapiens
  misc_feature (1)...(105): n = A,T,C or G
attttcctgaaagtaatatcntcncagagaagcttccctggnacctgangtacacctncctgcatganntccccagnaccagcagttataaccaggactatactg

SEQ ID NO: 1553 - DNA, 178 bp, Homo sapiens
  misc_feature (1)...(178): n = A,T,C or G
cctgggacatgttttctggaagagcnatcnaacgantggaacaaagaatgatnaccgtntgctgcaggctgtggaaaacgnagangcatganaangngacctcactgctgnacaanaaagggtccagccgccacgaagcatgacaccgagggcatnnaccagcgtaggagagaatttt

SEQ ID NO: 1554 - DNA, 114 bp, Homo sapiens
actgagaggcagatctgacaaattctggcagttctccctctgaggatgatgccctgccttcaggttctccctggagaaagaagctcagaaagaagtgtgagaaagaagaaaaaa

SEQ ID NO: 1555 - DNA, 274 bp, Homo sapiens
  misc_feature (1)...(274): n = A,T,C or G
cgtgggaaggtttcccagccgagnccagggacctgcaagcctgtctacttgctcctggagctggaggacaaggaacagcaccagggtgtccagcccgtggacggncagggaagtctcgtgagcagcctggccgttggtgccctctattgtganggaggagagcancgaggaggttnttgccatagctgctacttgtgctaaagaactcggacatgancctgtccctgctgatcttgggagaagtgcgcaccccagagcccccagaatctctcaa

SEQ ID NO: 1556 - DNA, 244 bp, Homo sapiens
  misc_feature (1)...(244): n = A,T,C or G
gatccagaggatgataaagaaatgatagcagctccaganataccaactgattttaatctactgcaggagtcagagacacacttttcttctgacacagattttgaanacatntgaagganaaaatcanatancaaggcacaggcaaaactttnttttttaaggcnggggggggtccagcagaaaagggtnaaagaggaaatggtaggaggaaaacctccttctnggctcacacccgaatgaacgg

SEQ ID NO: 1557 - DNA, 130 bp, Homo sapiens
agaggcaaagaatgttgctcctacaaaggaactctcctgacagaagtccacagaggacagatggatggggatgatttccacactagttcctaactttaaataaaaccaagcctgcagccgtgtaataata

SEQ ID NO: 1558 - DNA, 122 bp, Homo sapiens
  misc_feature (1)...(122): n = A,T,C or G
catactaacagaggctgggggggattntgtcttggntntcattangaccanngcgnccctattgatctnttcatggnggaaattgtggagatgaggcacaagtcngaaacggacacacaggc

SEQ ID NO: 1559 - DNA, 131 bp, Homo sapiens
gtgtcgtcaacaggaaagtgttgtctcagaagaggagctaagatgggaagtatgggctaggacgggaagtgcaggtctactacaggaccaggtgaaaaataaagtcactgaaacaattcaaagaaaaaaaa

SEQ ID NO: 1560 - DNA, 164 bp, Homo sapiens
  misc_feature (1)...(164): n = A,T,C or G
gatgtaccctgctaccaccagggccttgcttcccgtgtagttgccaaaagaaaaatttncgctgccccatccctcctgctgagaagncttcctcctttgctngggcatttccgctgccccattgctcctgttgaaaaggacttncccttttgcttgggcattta

SEQ ID NO: 1561 - DNA, 536 bp, Homo sapiens
  misc_feature (1)...(536): n = A,T,C or G
gaactgaggttcttcaggagatgtagctgaaacggttggtgaccaatcagtcctgtgtgagntctgatntatanggnccatgtgcagcnnctacaggncncgggnaacacntantgacactganctttncagcacgngngagaggnctgcnttcntggncncntcntatnccnantcctcnttccaagagcgcacctnacaatcctgcnaccagtccttcngtggcanngtctganagcatgcacaggtcaatgacttcttgcagacacaggaaatccacgcactcaantccagctngagatgttnctcggagctnttcanagtcggnactgcaacacaaaggagcangcaggcttnctccagactnctatntaggatttgcccaggaagtaagcatcngtcagactctgnacattcctgntagangtnccatgtacttggcagcattcgagtnttcctacgttnaaagagaaattctttaanaagaatttccagaagctgggcgtggnggacacgcctttaatcccagcactcgg

SEQ ID NO: 1562 - DNA, 324 bp, Homo sapiens
  misc_feature (1)...(324): n = A,T,C or G
actgagtgacaccagggcaaaggccataanctccttncatgctgncttcctgatacacaaagcatcacaaacctctcganttacctctgccacccgccaactccacgagccctcttcctgtcccctgaatgccatgcttgccagcaacccctggttcacatcngngacttaagggatccgatgaagatatgtggaccaggatgctctgtctttgagcagcctactctaatttctttttggatgctcccttttagttcctcgaactaagctgcttctttgctaagtacacatctgctaaataaacttcagcttaaaaagaaaaaa

SEQ ID NO: 1563 - DNA, 164 bp, Homo sapiens
  misc_feature (1)...(164): n = A,T,C or G
gccacctggcttctctttctagaggaccnaggttctatncccagtnntgacattggaagntcanangagnagtgntnctncgtnctaaatctgaagtnctctctgacctctttgggnactgcacacacatggncaaaacacctagatgcataaaataaaaataa

SEQ ID NO: 1564 - DNA, 481 bp, Homo sapiens
  misc_feature (1)...(481): n = A,T,C or G
tgagaatttaagaagcttttattcatgtgcatgtcatagaagatgaattcatcctcttctactatgaatgaagaacctgatgctctatcagtagttaaccagctacgggatttagcagcagatccactaaatagaagagccatcgtccaggatcagggatgtttgcctggccttattttatttatggaccatccaaaccctcctgtcgntcactcagctttgcttgcgctacgctacttggctgaatgccgtgcgaatagagaaaagatgaagggagagctggggatgatgctgagcttgcagaatgtcatccagaagactacaactccaggagaaacaaaacttctggcctcagaaatctatgacatccttcaatcctccaatttggctgatggtgatagttttaatgaaatgaatttcgcgtagaaggaaagctcagtttttttttgggaactacaaacaaacgggccaaaacagtagt

SEQ ID NO: 1565 - DNA, 356 bp, Homo sapiens
  misc_feature (1)...(356): n = A,T,C or G
tcttgtggaactcttaaaggctcgtgcagnanagcatggcntggtnccntatngganttctttacnatgtcgngtgcctgttgatccacctgaaggagtatggccaccaggttcctgaaagggggaaagatgaaatggttcaatctacctgagggttaaaacgtcacttcttgatggaacagaggatacaacaccagggnnnnatgtncnctncttgnanagttnctgactncntggacngcgacgctggnntgacncacatagagatgttnctgctcngntnnacgnccttgactgnctaacncccggctggaattatattatcacaangaggnacctctacctcaaagactata

SEQ ID NO: 1566 - DNA, 188 bp, Homo sapiens
  misc_feature (1)...(188): n = A,T,C or G
acttgaacatacccaagatctctttctactcattgcaacttctgaatcgatcttctggtctaagaaaaaggatcaagattctgtgatnngaggagctgaanaacgttataannctacatgtgnctgtgtttttctgttttcttgnaaggtacaattaatttcttctctggtttttctattataaacca

SEQ ID NO: 1567 - DNA, 266 bp, Homo sapiens
  misc_feature (1)...(266): n = A,T,C or G
caaagcatgggtttgccagatgtgcaccacaaaggctgtggaggggtttgaagcatgaggttggcatgatagcgacctgacagtgggaacctancatgctgaatggagacngtttcaggagctccaggccananagacnccacnagatgaaataggtcnggncttttaccntcagtgcatgntnagncaggcacaancgcnggagcgagccggctctattttttagatacttncttcaatagagacccctgccttaaaaaaaaaaa

SEQ ID NO: 1568 - DNA, 179 bp, Homo sapiens
  misc_feature (1)...(179): n = A,T,C or G
gtgggttgtgacactcaagaagcctaccagagagngcctgggtatgaaccttgatggtatcaaagagcctgggtcnggtggtananagcggctgncncaagngaggtcgnagcatctccaagnnactattggaggncactgtacccacctggctttgaacaaacggctgccgggggaag

SEQ ID NO: 1569 - DNA, 129 bp, Homo sapiens
  misc_feature (1)...(129): n = A,T,C or G
ttaacctgatgatggangagatgatcttnaccttgctgacacacaccngtancttnantgacctgnaggactgtgaccaantccacgtgnatgatgtctcatccngatgacaatggtcaggatttaagc

SEQ ID NO: 1570 - DNA, 263 bp, Homo sapiens
  misc_feature (1)...(263): n = A,T,C or G
tctctatctccgccgtggtgatgtcctatctgcagaatcctcagcccatgacggcctccctggtgatgccacctaggagggttggatcctggactcaggcccaccttctctctggcctagcctttggctgcctccgccctccctcagctgctgtcctaaactttcctgagtgtggtctctgggctcccanctgaatggaaggaagntggccctttctttggggccctgcttctgctttgacaaagagataaacctgcagactt

SEQ ID NO: 1571 - DNA, 436 bp, Homo sapiens
  misc_feature (1)...(436): n = A,T,C or G
catgtgatgagccagaagctatcnncatgaggaagataggcctatcatcatggaaggagccaaccagccagagacggagagcagaagccagtaggggctgagcatgaagattcagttcctggacactaagactgttgttatatccagctcagacctgcgagccacaggcctggcctccagtattatgatggagtacttgggccttacctggnccagcccttggttctgggttctgcagactgctgtttgacctctggctttgagacatgcccaaagaagggctggctgttcttcatggcgtgctaagccagtgcctcagaactcaggaggccagcctggggtccanaagatgaccaccttaccttaggacagccacttggactcagcttgtggaggggggtcttgctgggctggagtnctgtgcctgggggggtct

SEQ ID NO: 1572 - DNA, 196 bp, Homo sapiens
  misc_feature (1)...(196): n = A,T,C or G
aagacaagaggagagatggagaagtgccatgactcaggggagaaggatgggacgtaggagcttcaggagggaaagccaaccagccatgtgagaattcggatagctcctgcaagggcacactgtgcagtgcatctggctgagaaccaaagcgatgtancccaaattaccagtacaagcttctgagatcctggaaaaa

SEQ ID NO: 1573 - DNA, 237 bp, Homo sapiens
  misc_feature (1)...(237): n = A,T,C or G
ctgtgaaagtgatgacnatgacagaacgtgncacgcnagctctagtgactggactccgcggccgcggataggtccatatacttttgttcagcaacatctcatgattggcaccgatcctcgaacaattcttaaagatttattaccagaaacaattcctccacctgagctggatgatatgacgctgggggagattgttattaatatcctttcagaaccaccaaagcggaaaaaaaaaaa

SEQ ID NO: 1574 - DNA, 142 bp, Homo sapiens
  misc_feature (1)...(142): n = A,T,C or G
atacatgagaaaacanggaagagaaaagagatgcactaacctttgaatataccaacatattggcagagatcaaaggaagttaacagtgtgtacccaaagaaccatgccgttttaatgaacaanactgcctatgaataaaaaa

SEQ ID NO: 1575 - DNA, 104 bp, Homo sapiens
tgaggctttgtcaccctctgcagacctcatccgccagcgagagatgaaatgggtggaaatgaattattcaattaaaaagtttactttagaccacaaaaaaaaaa

SEQ ID NO: 1576 - DNA, 125 bp, Homo sapiens
  misc_feature (1)...(125): n = A,T,C or G
agttgtgggcacgtgcctcttccagtttgacagcaagtgtcttttaccttctcagccacctgagaacccagaagagttggttttcaaagctgagctctgactaataatnaaactagaaacaacaa

SEQ ID NO: 1577 - DNA, 231 bp, Homo sapiens
  misc_feature (1)...(231): n = A,T,C or G
gtactctgagccctgatcannaaagagctttctgaaagacctatagngcatggctgcgnggtgtncacagggtttccctgtgtattctatnccttgganantggagantgacnctcactgcctgtggacggatcatgtnctnggggcnctctgaggactannagnanccntcactttgctngnctgccacnggaattcagngttgtggcanatggagatcccttggggccc

SEQ ID NO: 1578 - DNA, 266 bp, Homo sapiens
  misc_feature (1)...(266): n = A,T,C or G
gactgagttccggactccggggttctgatgggctgctctgaactccgtntgaccaggctcacacatcanagatatgcaggcanaaggatgtataganggaggaggaggaggaagaggaggaaatgnntngtctgnaccncttnatctcantatcctatctcngccnttcctatttntnctacntagtantncttcntcntcgccctgtggtnctgcgctcttcattcttgctttcctgngctgntatggtgctcactctgagaaca

SEQ ID NO: 1579 - DNA, 122 bp, Homo sapiens
  misc_feature (1)...(122): n = A,T,C or G
cttctcaagctctagatgactcatctancnngacacatgcnggcctcattcgggtaagaagccatttnaatgtcgatcnngtgcanttatgtggcctctaatnancgtgaggtgacccagac

SEQ ID NO: 1580 - DNA, 238 bp, Homo sapiens
  misc_feature (1)...(238): n = A,T,C or G
tcgcaggtgaagccttctggaacgcgtacacagcaggncgtgagggcngtgcatncangntaccacactctncggnctntangncctcatagggctcagacaaggctcctgcananaacacaggccangcccncctgnatctggctgccctttcactngttgnatgcggaagccggctgccncantccttctcccacagtacagnagnactcncngccacagtcacggtttcgggcgc

SEQ ID NO: 1581 - DNA, 110 bp, Homo sapiens
  misc_feature (1)...(110): n = A,T,C or G
gtcaatgcgtgttcctgaacaagaagatgtccactgtcccncaggaaagccaggatgggcaagaggaagaagtcactgttgaagatgttggacagagagagtcagacgat

SEQ ID NO: 1582 - DNA, 181 bp, Homo sapiens
  misc_feature (1)...(181): n = A,T,C or G
ccgagggtgttcgtgttgatttacagttatggagatttgactgaccatatngagacccnaaaatgggaaaatattgtttagaatgaacatggaactgttcatggaacaaaaatgaaagatgtcaatacccgngaaaaggataaacatgtagtaaagngaggatatcatgaaaaaataaaaa

SEQ ID NO: 1583 - DNA, 174 bp, Homo sapiens
  misc_feature (1)...(174): n = A,T,C or G
tgctctatagaacctttctaaacaggtccactacccccttctgcatcccttcttgtatcctttctctcctactacctctggtgagtagtagggctaaaaggaaagttaaagcttttaagaaccatcaggggngngctttcatgaggaaaatacctaatattaaaacagaaaaaa

SEQ ID NO: 1584 - DNA, 179 bp, Homo sapiens
  misc_feature (1)...(179): n = A,T,C or G
acctggcctcatacaaaccctgnagatgggttnttnacccgagangtttgtngatttcanccaatgatgntcatggggaaatgaacatanacagacctnatnttctaacagaagcccagtgnancacacccttgatagngtnctgaacatgactgcagatggttctgataaaaaaaaaa

SEQ ID NO: 1585 - DNA, 343 bp, Homo sapiens
  misc_feature (1)...(343): n = A,T,C or G
gactgagagccgcatcggctgtcttgtggaagagtcggtcacggtcacatctgggagcagcactgtcgttcctgtctcgnatgtgctcctgtgtcacatgtcacctgtcatcttcagaacctggaagttatgacttcgagaagccaaggcctgctcagnccacatggnanccctaaaganagcgganaaactgactgcactgnacngngnngggcttggccgaggatgcnctagctttcattcgncgctganacccgcanagttgnattagcttctngcaaagctcaagaactgtacaccaccaccctagngcatgcangaggcccttgctatatgcagaata

SEQ ID NO: 1586 - DNA, 107 bp, Homo sapiens
  misc_feature (1)...(107): n = A,T,C or G
agaatcttctcagggtccntctggactnttcggccnaaggatggactatggnnnaagatgccggaccctgatttcacagncctgagacgtnaaactcctggtgggga

SEQ ID NO: 1587 - DNA, 255 bp, Homo sapiens
  misc_feature (1)...(255): n = A,T,C or G
agaagtcctttttacccaatactttangtctgtctaccaaatcatcacaggtaagaatgtgtcataatgaaagccactattttgcatacataaagaagaanccacaaggcagaactgnagnnangactctgtggctnaaggggcttgcccctgagcctatgatctgagtttagtccctgggacttgaacagtggnaaagaattgnttctatcaagttgtcctttgacctctacacgtgcacagtggcacatgcac

SEQ ID NO: 1588 - DNA, 459 bp, Homo sapiens
  misc_feature (1)...(459): n = A,T,C or G
ctccacacagagactgaangccaggctgcggtggatggaccangatgctgnggnttgaccanactgctgcggatggaccangctgctgcgnntggaccaggctgctgcggttggaccaggctgctgcgggtggaccaggctgctgcgggtggaccaggctgctgcgggtgggcctcgctgcagttgctgcggatggatctgatgcctgttaagcatcacttctccagtgtgagcccgccacctccatttccgtcacgtgtgcccatctttttcagtctaatgaactccaaccatcagcgcaacttaagttcggctgtctgttcgtgcatgcttaatattaaaaatgtactaacagtgtggctgagaaatcaaattatgcacataaatatgctggcatagcanaggcggcggcagaagctgaacttagcagagctgacgccagttcacatttgcaaatcg

SEQ ID NO: 1589 - DNA, 106 bp, Homo sapiens
gaagtaccgtgtagctgaagatgaccttgaacttctaatcctggctctgctccccatttctgggattataggcttgggccactacattccatttgtgagttgggga

SEQ ID NO: 1590 - DNA, 213 bp, Homo sapiens
  misc_feature (1)...(213): n = A,T,C or G
aaagcgtcgtctaaaagaaccaaataaacaaatagaaaagatgccaggttagcctcagtggttaagccacctaacttcacaatacccagtatccacatggttaaaagagaagattgacatctgagagctgtcctctggcctccatggtgatcagtgagnggcacgtgagccatctnccctctactngcntgtgagngtctgcccttacactaa

SEQ ID NO: 1591 - DNA, 464 bp, Homo sapiens
  misc_feature (1)...(464): n = A,T,C or G
ggccatccccctcaactataaaaatatatgaatcggaattgcattttccctggacaaaaccctgagcagaaaccagaatgctacacttcatccagaaagtttctggagcatcttcaaagatgctgaagaacccttttacagngagacttggagctggcagaatagacatactttctctcaagacatgtctactgnagaacttttcctctttgcctccaagaacttggctttccccatcatttcaagtgtgtatgaggaagatacaatgctatcatgtgtcaccatgcaactttaaaaagcanaaggcagtccttcctccaaagaaacngaagcaccatcacttacctactcgatagcccaaagccagctttatatataactctggcggggttaatcccctttactgctcccccacttctcatggtaataacaaagtcttatatccccgtcctagctttcactca

SEQ ID NO: 1592 - DNA, 193 bp, Homo sapiens
  misc_feature (1)...(193): n = A,T,C or G
aaggcatctgatacacanatgctctcggtatggcgttatcatcctcggcaggaanagggcnctccatgccntgctcctnccactgattatagatctctgcgatggaatcctgaggaattttcacaaacacttcttttgcancttcatgtttctttaatgctatgaaaaaaattcantatatataaacttctgg

SEQ ID NO: 1593 - DNA, 408 bp, Homo sapiens
  misc_feature (1)...(408): n = A,T,C or G
catggatgggtagctgagataaaggaaagacaaaggctggggctgnggngcttgttgcctgacgccctgngagctgaactctgggactgctgttgcctatcccaggaagtgctgcttatttgagggtgnctggtggaaatgggtaatctccgaggatgtctgcagcctgcttgttgtgagctgtgactggggaaccccaaggcagaggcaggggtcaggcagctgagaagcagcagaagaacacacttagattcaccttctgttcttacaatagttcaaatatagaatcgaagtgaaatctcattggattatgcctctctaatgaaaagcgagctgtttgactatacggaaaatgtgctgacattaattgcttctgtttattaaaggtgatttgcaaattaaaaaaaa

SEQ ID NO: 1594 - DNA, 485 bp, Homo sapiens
gagtccctggctccatgccccaaacgcatcctggacgggtaacctcagagctgtgaagtggatggacatggaagcgaagcatggaggctgccatggtcactacgtccatggcatttgtatctatggaaacggagacttgcagtggctgattaattcgcaaagcctgtttgctaacaaatttgaactcaacacataccctcttaccgtggaatgcctggaactgaggcttcgagaaagaacactcaaccagagtgagatcgccatacagccgagctggtatttctgacccgcagcagctccggcctaaatggaaattgaagacgtaaagaagagctttcttttccaagagactctggtcttggctatgctgaagacttttttaaaaaatggttttcagggaaccgtgaggatctggcaacatggctctgcttgcaatatccactgagcactgtaatacatttgacaggatggctgaaaaaaaaaaa

SEQ ID NO: 1595 - DNA, 338 bp, Homo sapiens
gaagagctcagcacacagactcaaaagtacaaggatgaaatgtcacagctcaactgcagggtccttcagctggaaggagagccttctggtctccatacacagaaggaagagaaccacggtgctatccaggtgttaatgaagaagctggaggaggcagggtgccgggaggagcagcagggtgatcaaatccaaaacctgaaaattgaacttgaacgtgtgaatgaggaatgccagtacttaagactgtcacaggcagagctgacagaaagccttgaagaaagtcgaagccagctctacagtgtccagctgaggctggaggcagcacagtcccagcatgg

SEQ ID NO: 1596 - DNA, 370 bp, Homo sapiens
tgagatccttctccggggatttcggtttgggacgaaagccacagtgactgggcagtttcagggatgagcaaagtcagcctcgagcctgttccatcaaggcaccaagcccggcgacaccaacgctcaggaggtttttagtgttcatggctgccttgtggatttgttcttttacagtcatttctttattgagaaagggcacacaccaaggttagaggccacttgccagagctgttcttctcctgccctgtaggttccagggattgaactcgggcgagcaggcaagtgggatttaccctccgaatagctgtcagcccaaagttgttatttaatgaaatctgacccgaggtattagaaatcggaaaaaaaaaaa

SEQ ID NO: 1597 - DNA, 233 bp, Homo sapiens
  misc_feature (1)...(233): n = A,T,C or G
gccttatgagtacgtnccnacncacacgcgctgaacctgaatcaccacaacctcgcccttggatgacagccnaannctttngcattntgnctangattncncgangcacgcctgtctaatagccnagcctgttgatctaagagagcatnnntctccnanactcagctcngnaaggagagntgggcgaatggatccaatctgagatagtgctnctgtgcggcatgcatgggaac

SEQ ID NO: 1598 - DNA, 230 bp, Homo sapiens
  misc_feature (1)...(230): n = A,T,C or G
ataggaaatgaagcgccttgagccacatcatggtacagccaaacccagaagccaggctgcgaaggttaaagccacagaggcagtgaggagcacacgcctctggtggaccctcagatgcctcgcagcgacagtcatcctacacggtgtgtatttagacagtgccacctntgacttaagtncagttttcacagacccgagataaggcgggggggggggggggtcccctgccc

SEQ ID NO: 1599 - DNA, 122 bp, Homo sapiens
  misc_feature (1)...(122): n = A,T,C or G
aagcctggcctctcccattacagagagggggaagatggatatttgggggccttacgattgtcatnccctaccagctgtcacttccagaccaccccccactccaaacttggctttaaactttt

SEQ ID NO: 1600 - DNA, 274 bp, Homo sapiens
actactttgtggcccaccctgtccttgaactcagagatttacctgcctctccagcactgagaagattcaggaattctgataccggcttccctggctagaaaccttttaagagtactgttatatttgttactggggaaatccaccttccataaccctgctgggacataactattaagaagacgtttgctactgacttcgttcttcccttgttgattgtgcggtgttctttttttgcaataaaccattcactagtcctcctaggcaaaaaaaaaaa

SEQ ID NO: 1601 - DNA, 210 bp, Homo sapiens
  misc_feature (1)...(210): n = A,T,C or G
gcagttttgttctttcaaaataagaaccaagacccagggcttctgcagaaangaatacagtctgactggtctgtgcaatcggtcgtcctgtcccctggcaaatagtcagtatgctaccattaaagaagagaaaggtacgggagctacacgacaatttataaacggatgtccccagcctctgtaaataataataataaagctgtctaactt

SEQ ID NO: 1602 - DNA, 143 bp, Homo sapiens
  misc_feature (1)...(143): n = A,T,C or G
ggccaatccacgtcttctcaactcctcatctgctctcacatcacatccaatccaactggcaanggngntnctgctaccanngcagaacagncccatcccatcaccccacccacactaaaagaaagnacttacagaaataccaa

SEQ ID NO: 1603 - DNA, 270 bp, Homo sapiens
  misc_feature (1)...(270): n = A,T,C or G
gagaagcctgactcctagtagannctgagncttctgcactatnntccaatngtgnacaaanntgntctntttgnggaacanaaagaaatccgatccctctgngnagngnattgggaangaatncgattcctaaatgagangctcgagggtgaggcacctgtttctgaactctgcggttgagcanggangacgaggaagttccagcatggcctcgggggatgttggctaagggacagagcccaaagantncttcacagagaccacatattt

SEQ ID NO: 1604 - DNA, 467 bp, Homo sapiens
  misc_feature (1)...(467): n = A,T,C or G
tgagggtctctcccanacctgagtggaggcanaacccccntgggnagttttgttgcttgctgatccacttncggtctnggatgctgtggacaggtctgatgaagacaggtcccgtgtgggccgggaagactcagaggttagataggcganaagcacgagcgattacctgaaaaatgctgtgtgcatcattatcgcccananagtgctttggcgtggnngcggatcccattgtgagtgatgtcttctccgctgatgcagttctcatggtctttgtncactgggacaccaaanaaggcaccctggacagtctttcctggcagcaaattgtanatctgtgcattggagganaacaaagggctggacctggaggcaagatgcagaggctaaccataaaacccgngaggcattcttcgaagcctgtacatgaggacncttctctggaaacacaaaggcattttaaaagacat

SEQ ID NO: 1605 - DNA, 344 bp, Homo sapiens
  misc_feature (1)...(344): n = A,T,C or G
gcacgttttgtgccctncccgcctncaaattgcctcagttacaaatcattagggcaggcttggtgagcaagactggcaagcacattttaaggtcccgtgctgtggggttgatccatctcaacttgagtcataagaggcagaagnggatgtgagagaaagagacacacactagagacaganagccaaagagggcagagagacttgactttaagagactcctgnactgacaactccatgcagttnggaaccagaacaactgcggctgaaccanggttcatggggacatggcaaaacgctgacactaacctcttattcagaatgtcccaacaggccattcgctgtac

SEQ ID NO: 1606 - DNA, 158 bp, Homo sapiens
  misc_feature (1)...(158): n = A,T,C or G
agaaccaccaattgcncgctcttaaataatagcnaacagngggntgttataaggtgctttataatatcaaatagagcctngagcaacacanatcacagggngctagggagggnagagccccactgctgnacatgcaaaacacagatgtgaacccagaa

SEQ ID NO: 1607 - DNA, 370 bp, Homo sapiens
  misc_feature (1)...(370): n = A,T,C or G
agaagtcttcatcagaaatcatggcactgacaggctgnggttcangttcaggtgaagagaatctcacaggcagatggcagctactgangagcgagttctgtgataaccgcagaagggcattcgccaactagaaagaacaaacagggcagtgtgagtgccccgacanagatgagagccttggagggcagagcatcagagatggagacccatcccacagggggcctctgtgtctgtgagcaggatgccttggaaaggccaacttcccagcgacacagacgcaaaggcaattccagcgaagaattgctccctgtttttaccctaaaagtgatctgtcagctgccancctcattactttttctatttcctttca

SEQ ID NO: 1608 - DNA, 145 bp, Homo sapiens
  misc_feature (1)...(145): n = A,T,C or G
tggtcgcctgctgccggctcacgatcanccancactagaanacccactcgctagcggagcaccgcccgactcacgcacgcggacacgttctctatggaggacccggtgcggaaggtcgcgggcggcggacggccggcggggaccg

SEQ ID NO: 1609 - DNA, 329 bp, Homo sapiens
  misc_feature (1)...(329): n = A,T,C or G
tagcatcagaatgttcctgaagaagaaagnatttnctttgnagnacacatggagcggatttacaagagaggntnnctgcttcgccattntaggtnanattngcgactgcgagatccnggataaganatcncggaggnctnctnctttaatctgatgaganacctgnggcacaggaagctnattgtgggcntggtaatttggggggagcntttnagtacaaacccaanccctttttacccttttnaaanagtncctgggaacaaacgggttccatnttttttaaccccaaatttttaaacttttgnttgggacccaaacccttaaaaaaa

SEQ ID NO: 1610 - DNA, 129 bp, Homo sapiens
  misc_feature (1)...(129): n = A,T,C or G
cgtctactccatgcanganccactgcatanaaggactgtcccaanctcagaggaactcttccaagaaacctgtatngactacttgaggccttgaactgcctanagngtgggnctgcctttgcttcctag

SEQ ID NO: 1611 - DNA, 393 bp, Homo sapiens
  misc_feature (1)...(393): n = A,T,C or G
gctgtgcataccccgagtggggctcctgtcaggagaaaaggccatcgctcaagaagcnggctcagcggcagctgctccatgaggagcctgaaggtggtcctgcagcagaaggaggagaggacacgggagctcgagccccaggtgactctctgcagagctatggaggccaggagccgcagccgctgaggtgggtgtccacaggttagggtgccaagaaggcatgtcccggcttctctgggccttggtatccccacctggaagctggaaataggaaatgtgagggagaaattaacatgtcaaatgctcaatacaacgcgctcggggccctacagatgggtgtggtggcttatgcctatcattttggctttcaagttcaaggtcaacttgggcaat

SEQ ID NO: 1612 - DNA, 194 bp, Homo sapiens
  misc_feature (1)...(194): n = A,T,C or G
gcatccccactcgtgtttttaagtgtatntttataagatacatgtatttacaattgancttttgttacataatgctgaaatgctactggagatngtgaaaaatgtttcaattttatctggtccttataccaaactaacatggtntattattatcaccttagtgatacagganataatgagctaaaaaaaaataa

SEQ ID NO: 1613 - DNA, 242 bp, Homo sapiens
  misc_feature (1)...(242): n = A,T,C or G
tggatgaagaaattgaaaagcgacccaaagaaaaatttaccagtaaatattgctggtaacaatcgnttagacttnncnacacagnnnctcanggnnngacttttgngctgantttncaagcanttcttggaccnacgccatgtatcaanaggngnggntgtgaggtataacctcatcggcgatgtcggtgccttctatgctgcgaaactacttcaggtattacgttgctgccagcaagtgtt

SEQ ID NO: 1614 - DNA, 236 bp, Homo sapiens
  misc_feature (1)...(236): n = A,T,C or G
aggacacgcctaaatgttgtgaagttgtatgttcacaaaggggattcggtgactgtgtacacgagtggtggtaaccccatcctatttgaactggagaaaaatttgtatccaacaggtatggtaaccagatgaaatgcccagactgcagccctggtgaaacacgttattctctgttgattaaggtgtgatatttgtttttgttttcccccataaacntaccttttcaaatgaaataa

SEQ ID NO: 1615 - DNA, 143 bp, Homo sapiens
  misc_feature (1)...(143): n = A,T,C or G
actctgaccagactctganggcatacaccagtagaggatgtngaaccaaagaagagcacntacgttcagcatctagttcagaagatgataagaagaagaaaaggaaatctagtcattcaaaagacagagccaagaaaaaaaaa

SEQ ID NO: 1616 - DNA, 129 bp, Homo sapiens
  misc_feature (1)...(129): n = A,T,C or G
aaggaaagccacagcattcattacgacatgacanntgacnctatgancaagtgagcatgtatcngaaaaggagtctngacgaaagaggantgaatttgacattaataaagcnatttatttttaacaaaa

SEQ ID NO: 1617 - DNA, 256 bp, Homo sapiens
tggctgttctggaacgttgctttgtgaaccaggctggcctcgaactcaccgagattaaaggtgtatgacacctctgcctagctccattctctactgttctctacaatgcccgctaagtcaatgccacggagaacaaaagctcgctcctcgctcaccagatgccgggtggaaactacatttaccacaagactgtgaggctctctagactctgagccaatcacaacccagatgaaaagctttttctcaaaaaaaaaaa

SEQ ID NO: 1618 - DNA, 143 bp, Homo sapiens
  misc_feature (1)...(143): n = A,T,C or G
ttcttgagtgttttaagtggatcgagctgccgctgctaacctgtgaactgaactgccaatttccagacaacacaaacaggagttgctccaaagaacctttctaaacaggtncncttgccncgctgaatatcgtttcttttgca

SEQ ID NO: 1619 - DNA, 110 bp, Homo sapiens
  misc_feature (1)...(110): n = A,T,C or G
atagtgtggaagatctcagggaaagnganggaacctgcaagtgnggnataanagacctgactcctganngttgtcttctgaccacatatacacaatattgtaaataaatg

SEQ ID NO: 1620 - DNA, 566 bp, Homo sapiens
  misc_feature (1)...(566): n = A,T,C or G
gactgaggtggggtctttctgattgatnccngaanggagacngacggangtgaggctcncacatgagnggaagctgncattcccgngaggtgctttctttagtgagaggnagacagaaaatccttttccttctatggaacagnagagccngaaggggcaggttcatcactcaagccaggaaaacatctccgnttcactgaccggcgccaggcctcacagnttgggagaagcgacctacggnnnggaaatagcattgctctgcatgcttatgggaactgttagaaaggacnagaagngcagaaccctgctggagcccgatccagccagctgctgaattctccatccgcaagnctccatcctcactcctctgaactggcgctgccagaggcaccttgggaatnccagcaggttcctgttgcaaatggccctcaccaccaactcattgnctctgcatgcacggntcctcccaggggctggcgttaaatctggactcacttaaggggntagannnggngncctaatccctttattttgggnaaggggccaagntactaaacacccttgac

SEQ ID NO: 1621 - DNA, 450 bp, Homo sapiens
  misc_feature (1)...(450): n = A,T,C or G
actgagggcttgagtcacangcgccnttcttggggaccctggnncgctatcattggnaacnganaggncactnctnctagctnatganaggagcanaaccctcgggnctctgctggagtcncactgnggcatntagctcagttttctgttncattntctcccttantactgaanattccttctgcattcatggcaggggcaccagccatcatagacacttgcctnggtatccggntttgctgnagggncgaagngcttnagngacacatgtggctgttgccnttctttctgcaccccanctcccaactgttcccaccttcaaccctctttcccattccaacgctgctctgtcctatagcttcacaaaacanggagcgtgtggggctgangtcaggactgtaccttgggcactattccttatacaaaatattaaatattttttttcctcag

SEQ ID NO: 1622 - DNA, 119 bp, Homo sapiens
  misc_feature (1)...(119): n = A,T,C or G
ggagaatcttgaaactctcccatacataacacttcaagccaaactggcagcactgacccaatctctaaattaagcgcangngaaatgaaatcattaaaaaaatatatatttcctgaaag

SEQ ID NO: 1623 - DNA, 183 bp, Homo sapiens
  misc_feature (1)...(183): n = A,T,C or G
ctatgatgacctgccangattctcatatgagcatggggtcancacctgcagatgacctggtccgaganggtgggaccgatagggaacctgttaaatccttacactccgaagatananctgtannaaatttaanagnttnggctnngnntnnttntggacagcttgccagaagtggggttggtg

SEQ ID NO: 1624 - DNA, 385 bp, Homo sapiens
  misc_feature (1)...(385): n = A,T,C or G
aaggaacatcaacagcagccctaccgagaacgcanacaaacttctcggcttgnggtgtctcctcagttgttcagagcttgagttttgctcgaggatgatgagacaaggcnctaagagggnaaggaggagtgngctaaggttcctgccacttnctccgnncttnagtccacangaagcattgtaagaagggctgaanaacaagctgtgcttggncctgaatactggngacttgaggattccatctgtttcaccaggcgtgtagggaggccgttttagcaacatagcttccttagcagtacttaaagacttttctctgcattggtcatgtgccaagttacattttgaacattggggcaggngaaggaaggacagctttggcacctgg

SEQ ID NO: 1625 - DNA, 160 bp, Homo sapiens
  misc_feature (1)...(160): n = A,T,C or G
tgctcttctttggcaatcacagcatgtttatttatgaactggcttgcttggaacctgattctgacatctgnggtttttggctgaagaggttaattttttcctttttgntnggnttgcgaacctgggtttnggggaggggagcacaaaggaataaaaacac

SEQ ID NO: 1626 - DNA, 145 bp, Homo sapiens
  misc_feature (1)...(145): n = A,T,C or G
atcatctatcgaatgcggactcacccagttctcaacggngctgcctgagagagacccttgaaggcgggatggcgtgtgataagggcagaggtcttgcccctatcctgatttcagaaagacagcggggagactcagaaaaaaaaaa

SEQ ID NO: 1627 - DNA, 205 bp, Homo sapiens
  misc_feature (1)...(205): n = A,T,C or G
cacgcgtgacatcactctgtcaatcaccccaagtccactcaagggacaagaaactgtggcacaccaccagaagtttttttgtttttgttttttgctgnatttctttctattgagtcccgataaatacagctcaactacacaatataagacagaccaatacatggtgtgtccttaataaaaaaaatctttcaccacaaaaaaaaaa

SEQ ID NO: 1628 - DNA, 375 bp, Homo sapiens
  misc_feature (1)...(375): n = A,T,C or G
gtcctcctgaacgttctgggacactccactccatcacggctaaatagtcgcagggcgtggccatatgagcanatcacagntaacgtaaccagtacctgttgtgaggaggcntggattggataaactgcaggnggtagaagatccaatcccactctcccaaaatactgaacaaatttgnttatttctggggtgggagtganacagggtctctccccgtactcctggaacttaggaacttattatgtagactaggctagcctcaaactcacaggagtgctgggatgtgccaccatgcacagccccaaattcctttacacgaatcttgagcgttttataaatacaaagcggagatgctgcctgccaccaaaaaaaaaa

SEQ ID NO: 1629 - DNA, 360 bp, Homo sapiens
  misc_feature (1)...(360): n = A,T,C or G
ccgtgccaacaaggatgccttggctgaatcacaagaacgagtgcccctgccatcaagaaatatgggaaagngcccaaccgagaacatcaggctggccgcccgcatcatgtggcgggtggagagagagggcactgggctcacagagggctgnctggtgtcccgtggatgacttacagaaccancgtggagcactttggggaggaggagcagaaggaactccgagtagaccgnggacaccgttcttgcagtactggccaccacagagccngcagttcagcatgcagtatatctcacacatctttggngngatcaactgcaacggtttnacttctnanntgaccagagagggctacaggcagt

SEQ ID NO: 1630 - DNA, 362 bp, Homo sapiens
  misc_feature (1)...(362): n = A,T,C or G
actgagattgacgggctagaggaaaagctgtcccggtgtcggaaggacctggaggccgtgacctcccagctttacagggcagagctcagtcctgaggacaggaggtctctggagaaggagaaacacaccctcatgaacaaagcctccaagtatgagaaagagctaaagctgcttcgacatgagaaccggaagaacacgctcctctcggtggccatcttcactgtcttcgccctgctctatgcttactggactatgtgagtcagccatctccagccactanaangacgtggtaagtgcttccttctgcttagtaagaggggcaataaagagccccangctctgctgtctggcaaaaaaaaaaa

SEQ ID NO: 1631 - DNA, 390 bp, Homo sapiens
  misc_feature (1)...(390): n = A,T,C or G
gctcattcaatcaggtgagntactgnanaatatctccaggncaaagntnttttcnacaatccccttnggaaggtgtttcctattagcagatgactatggatcnctggcagcctctggatgcttcctcgggangtctcatggcgggggcatattgattgtctttcaattaattgcatntggtatttttcatttatcaaaagcaaaatacntgtnattaactctgaagcaatacagtccagtggcaagagatccctgctgcttgctgctgctgctgctgctnctctggagataagtcagcgggaaattattcttacaaggaaactctaggatggtaggacttttggaccgtattaattaaagagaataaaaangaattaggggaaaaaaaaa

SEQ ID NO: 1632 - DNA, 119 bp, Homo sapiens
  misc_feature (1)...(119): n = A,T,C or G
cctgacagctcacccgaaanatccanactgaccaanggaatactaangtccctcgtcttggtgatntncagggcgtcaataataaagagagagcagcagttgggggaaaaagaaaacaa

SEQ ID NO: 1633 - DNA, 284 bp, Homo sapiens
  misc_feature (1)...(284): n = A,T,C or G
acctttcttctttttnaatacactcacagtatcanaacaccacggtttcatttactaagctctangagaccattntgnctgtggaggcaaggggcatttggncctgacctangtgaacagttgccttaaaggggaaaagattnccagcagganggctcagngtttaaggggcacttgcagctcttgcaaaagncctgggtttggtccccagcgcccacatagcagtcacaactattcctaactccggngccagagtctctgaaccctcctctggcctccacagg

SEQ ID NO: 1634 - DNA, 255 bp, Homo sapiens
  misc_feature (1)...(255): n = A,T,C or G
cgtttttcctaaatattganactggcttgnatcaagacacacagnatattgttcacaagcatgtaactatccaaaagaagtcttataaatattatgagcatggcaaaatcatccaggaatacacccaaagtgtactttaccaagataacttcagggatacacatgttgagtcatcaaacgtaaacagacatgaaactggaaacaccagagaaccttgcaaatataaaaattgtgtaaactgtttaaaaaaaaaaa

SEQ ID NO: 1635 - DNA, 110 bp, Homo sapiens
  misc_feature (1)...(110): n = A,T,C or G
aaatctggaacctggtgtcctggccatgtgctgaatgcacgcacagcacagctctggnatctgttttaaattatccattaaaataagtacagtcctggaaaaaaataaaa

SEQ ID NO: 1636 - DNA, 210 bp, Homo sapiens
  misc_feature (1)...(210): n = A,T,C or G
ctgcgtctgggatctgcctcaacgccttgngagtcaccatcnacannatcggagaatggnccctccgcttcttcggctgtntggtcacttnnatctttcagnggnattncntangctaatcaaatggacnggaccancattttacttggacggacaccatagnacctacctcttctnctgnggtctatctagggggttggggtgggggga

SEQ ID NO: 1637 - DNA, 112 bp, Homo sapiens
  misc_feature (1)...(112): n = A,T,C or G
acgggccatgatgaaatcatccccgangagcatccangaaggngaagctgagngagcgnggggaggtgtccaccttcacagaggaagntatanatcgaaccttgtcaaggta

SEQ ID NO: 1638 - DNA, 108 bp, Homo sapiens
ccctctgctctcagccctctgggattttgcttgtttgctgtttttgtttagttcagatctattttgtttgtggtttggaaactttcagaccgaacagagaaaaaaaaa

SEQ ID NO: 1639 - DNA, 181 bp, Homo sapiens
  misc_feature (1)...(181): n = A,T,C or G
catgcataacgggcatccagatgangaatccgtgaacntttngactggagttgatcnctaacccaatggactttncctgtgctgaccaancctttcatcacaagcattatatancggttgntgncccctgnaaatgtnancanacacgaagngagatacgctgtatacgaccactgtgcac

SEQ ID NO: 1640 - DNA, 210 bp, Homo sapiens
gtgctagagcgaatccattataacccaggcagaggaaaaggccgatttcgtgatcattccctctgaaggaatagagaacagaacagacgagccagactctccatcatcccgagactggaggcctgggagccggggaacctacctggaagccacatgggaagaacagctgttggagcaacaagaacacttagaaaaagaaatggaggaagc

SEQ ID NO: 1641 - DNA, 487 bp, Homo sapiens
  misc_feature (1)...(487): n = A,T,C or G
agctccgaccacagcgtccagaaacagaccccaaccggaagaggcggatcccgatagacaccaaccggaagaggcggctccagatgagcaggagagaggctgctctaccggaggtcccaggtttgattcccagcgcccacttggcagctcacaactatctctaactcgagtcccaggacatccaatgctcatctttgacatctgcaagcaccagacactcaaaactgtacagatggacaagcaggcaaaagacccccacacataaaatacgtaaatcgttttaaaagtagcagaagaagcanagttaattagactgagggacagataggaaaggtcaggagagcatcttgaaaatacacttacctcagctgcaaagacccccgctgcagcgcccccaacttctgagaggcagtaagaagtgttgaaacttgtccctnaggggtatttgactctaggatgggactttctttcaagcattgaaaaaaag

SEQ ID NO: 1642 - DNA, 431 bp, Homo sapiens
  misc_feature (1)...(431): n = A,T,C or G
cacgaaacaaattcagncaggcagctccttttggggcctaagcactggagacactcctagaagtttctggaaatctttgctgttggccctgaaagacctcgacctctcgtcctgagcgctatacagaaacttcccgtagaggcaccgtgggtcaccattggtggatctgttgtatgcttcctgtgcctccaacatgtcaaggccactccagcctgtaagtcactcggacccagggaggcttgccaatagccaaaccaaagaggcctgtgaggctaagccaccagaagccaggcacctatcacatctatcggctcgggaaaatgtcccagtggcntgttnngatccanctcttgaaacggatcctaccgggaaccnaatcgtacacaacaaaaaggcggccgacccagaccatcctgaccttgccagcatgt

SEQ ID NO: 1643 - DNA, 217 bp, Homo sapiens
  misc_feature (1)...(217): n = A,T,C or G
aggctggcacggctccgacgtctgtgtggaagcttctccctcccttctgagcttctctagactccttacagcgcacaggcacagacacatcacactgcaatccagggtatgtctacatncgagctgcnccgnatanactggangggctttggangggatccnttgncagagcacncatggtgctggattaaaatccanctacaggtaaaaaaaaaaa

SEQ ID NO: 1644 - DNA, 284 bp, Homo sapiens
  misc_feature (1)...(284): n = A,T,C or G
acgcatggacacgggnnggtctactacatcaccacacgggcccaggtttgactccatacaggacctagtgcnggcacatacatggaagtgaatgatggtctgtgctacntgcttacggccccttgtaccaccactaaacccccagacacatagantntggncaaggatgncgggggagatnagacctggaacttcttngcacttngaactgcaagcttgggcaccntntgcttanggagatntanaactgggcacttnggnactgcagcacaaaagagtgggaa

SEQ ID NO: 1645 - DNA, 774 bp, Homo sapiens
  misc_feature (1)...(774): n = A,T,C or G
ccccgcctgtgtatcaccaccancgtancacatgcacgtgtgcgacaggccttacnttatggctcntccgaccccactccccggattgatgtcccnggctccggacaanctgcaggccngaaaccttcaggaaactgaaaccncccctgcngggcagcctcccggatnacttcctccnaatccttccccagcaaatggacancnttcagggtcaccccgggggctccnnccctatgagtggagagggagcccacctccggcnccagggcccatggcctgttacnnanacagnccctngaancngtacctggaaaataagagaattgccctcttcntgcanaatgaggaattcangaaagagctgcagcnaaaccgggacttcctcctcgcccngaaaanaaaccnattganatgtgaatcccagaaatccaatcccctntgcggcggttgggaaatgacggtgggtttccctcctctgtcccggaaccntgantncctcnnaaaagngtngnangatnccttgtgccnggacancttntatncntgggnaattctanctcangatctntttgaantcncncancggtngtaacaaaaccgttttnggaattgaaagaaanaanttttccctgnntantttgatggggnttgctgtnatntgaagncaggctcccggtntaantggnaanggctaggtttactaaaaaaaaattcggtgggttngcnaaannggatgntgggttttgggtgcnaaaaggccgaaaaaaaaggaaa

SEQ ID NO: 1646 - DNA, 373 bp, Homo sapiens
  misc_feature (1)...(373): n = A,T,C or G
ctatttttggaagaccttcgacctccatnctctggtcgcatttcctgtgccttctggnaacatcgggagtccaccagangaggatggaggcacggcgtgggacattcatcatgggttggacacccgcacacngtgtgccatggtggcttcacaatgggcgttncgngtctgntgtgtgatgcactcttagagcaagctctgtggctcagagggaangagacgggatcactcagaccctcccactccatatggccagtgangcgtccaggaagacgcttcctgctagcgtcatcataaaggggaacgcaaagctctcagtgctttgccctgagccccactggatgtggtgtgtatgcaaaaggaagcttaacct

SEQ ID NO: 1647 - DNA, 388 bp, Homo sapiens
  misc_feature (1)...(388): n = A,T,C or G
ctctacccacttgtacataatccagcatccagcagaggaaagcagagtgttgcgcacagtccctctgctagcagcatgccttcccccagacagatgcacagtcaagattggccgccgcttcagtgaagagcgagatgttgaacttgcaactgtttgccgggactntggtacattaatattatatccaggggctgaagctactaattnggaanaattnatattanattctccngtttatccttccacaatcatcctcattgatggtacatggagccaggctaaggacattttntataaaaattccttgttccgacttcccaaacanataaatgccttgctcagtcntcatnanaanaagcttccttctgcagcagatggaaacatttac

SEQ ID NO: 1648 - DNA, 122 bp, Homo sapiens
  misc_feature (1)...(122): n = A,T,C or G
cctgatggacaacatgctgcggatgccaccggngatgagagcaggtttgcaccgccagcttnngttcgttacggcctttgtntttgctggatacttttatttaaaacggcaaaactatttgt

SEQ ID NO: 1649 - DNA, 184 bp, Homo sapiens
  misc_feature (1)...(184): n = A,T,C or G
tcccagaacatggtgctgcttatatacgnccnntgatangcgtgnctcacacccngattggttatnctctacgcctcatttgcatgttcctcatntggngggctactctctgtacctcacanagcctcattatcatacctcatttgcatgtctcacatgnctattggggcatacttttacagct

SEQ ID NO: 1650 - DNA, 476 bp, Homo sapiens
  misc_feature (1)...(476): n = A,T,C or G
gcagccaccaggcatctgaccctgaggaaaaagggaagcctggcagcatcaagaaggccgaggaggaggaagaaattgacattgacctgacagcgccagagacagagaaggccgcccttgcaatccagggcaagttccggcgattccagaagaggaaaaaggattccagctcctgaatggccaggcctccccttaacccttctacttcctctntgccctccacagctctgactctcacgtatctcattccttcatccctctagcctctccccaaggcaagcttaacctttatatattcttgtctcaggctctcttaagccatcacagtagtagaggcacaaggatgcgaaggtgaagactctagctggtagtcactaggctaagggtggatcagtccatttaggagaacaaaaggttttgagatgggaaattctcccctttgcctaatgctaagggcaggagggggcaagccctca

SEQ ID NO: 1651 - DNA, 184 bp, Homo sapiens
  misc_feature (1)...(184): n = A,T,C or G
ccttacagactcaagactgatgagtaaggacagagtantnntngcccggnaagaagaccccanactaccctagaacagagatggcnnaccttctcctgatcgttcctgngttgtgccactgagggagagagggtgangacacacanagccatcagggtangcnggagaccctgaggcccctctg

SEQ ID NO: 1652 - DNA, 339 bp, Homo sapiens
  misc_feature (1)...(339): n = A,T,C or G
cctcattcctgacttcagtctcacgtgggaccggcccttggtgctgacagcatgggggactgnactgnagctggcatgnatanagccancctggnttgcccactggctgaaganagcancggnggcggaagcagananngagngngtggnttctctctgacaatctttttgggcccactcccacgatgccagcctccagaagagggaagctgtgtgggagacggtgtgtacaggccccgactctggcctttgctctacggagctggcgacctcctggtgcacaggtgacatctagaggatccgggcggtcctcgatcagtgntggaaaagaaggggtct

SEQ ID NO: 1653 - DNA, 289 bp, Homo sapiens
  misc_feature (1)...(289): n = A,T,C or G
ggagggatgaccaggcgtgcaaaagctgacgcgaggatctgaaaccagatgacccgggaaaggcccngncaccaaaagtgacctccttttttaaccctttatgtcaaaatataattggtcaatgcaagagtctaccctgttacccgncactttttgttcccatcctataaaaatattgtagaaatattggacagnctcccttcaggaattcggatcagaggggggagctgcccacctccctcagcgctaagaaaataaaacttccatttttaagcttcaaaaaaaaaaa

SEQ ID NO: 1654 - DNA, 264 bp, Homo sapiens
  misc_feature (1)...(264): n = A,T,C or G
agactgaggtgttcttngtgnccgacctnttcgagactaanacgagcctctcactgcccgcccctgcgatcagggagggagatcctgtctcccgtggacatcatcgacaggaacaatcaccataacatggtgtagatgctgcggcctccggagcgctttctctgaagcgactgcacgttcctgctgctctccgatctcatcagacagtagaatgtagggaaaagcttttgcccgatggattttgaaaacatttaaaaaaaaaaa

SEQ ID NO: 1655 - DNA, 326 bp, Homo sapiens
  misc_feature (1)...(326): n = A,T,C or G
aatacttttagacctactggaacctcactgttataggctacaccttgggaaaaccatcatattgaaagacattgtcaaagttcaagaagaaatgaaaggtctatgaggaacaaaaagtcaaactgtgaatgcattgtgganggggggnatcttttactcttctattaatatatgnatcatgtgtcacaattgataaaagccatgttagcatagggatattgaaagaagcaatgtaccgctttctatcccagaactgtgagaaaattgtcagattctatctttggtagacattctgagtatgataaaagtttgcaatgaaaaaaaaa

SEQ ID NO: 1656 - DNA, 216 bp, Homo sapiens
  misc_feature (1)...(216): n = A,T,C or G
tgtgttacccatggagtcangacacggnccccggagcgttnccaaaccaancaggtcccgttgattaaagtcaaagctcacntacaggaggcntgngccggaggaccacaggcagggcagggaggtattctgggacttcttgaatagctaggantcagtcagaacttgaatttcgacagttttgaagaccgtctgtgcccttcaatcaaaaaaaaa

SEQ ID NO: 1657 - DNA, 244 bp, Homo sapiens
  misc_feature (1)...(244): n = A,T,C or G
tggcccccgcacatggtgccagctcttatgactgncncctgacttnatcatatccctnaagatanncacagtagccttgagcttgtattgcgcanangcnccacanatgtaagatcanatnatgtgacnatgtattnctgagccaacgaactgngcctatgtggactgggctgagggggagtggactggaggggataaagggggatggcggagagaggncagcanttctttttcctgcacattg

SEQ ID NO: 1658 - DNA, 124 bp, Homo sapiens
  misc_feature (1)...(124): n = A,T,C or G
tgagggcatgttgagtcggctgcatctagtngatccaacgagtaggagtgttggctggtaagctgggcatccgtgtatctgagtttcttagcaataaagtgaaatgcaatcttaaaaaaaaaaa

SEQ ID NO: 1659 - DNA, 113 bp, Homo sapiens
  misc_feature (1)...(113): n = A,T,C or G
agtggaagcttgtgancatgaggagctnngancatgnagagggaagcnanacnggagggctttntgccccagnngagagagatcgcccggcaggtgaaggcctatgagaagca

SEQ ID NO: 1660 - DNA, 104 bp, Homo sapiens
atacatgcctcacatgtgaagccagcccccttagctgagaccagaattccaggaaaccaccctgtctggaaggcccaggctacggagaaccctctgaaagtgaa

SEQ ID NO: 1661 - DNA, 141 bp, Homo sapiens
  misc_feature (1)...(141): n = A,T,C or G
tgttcccatgaacatgcagaaagaggagnncgtgagtgtctgggtccgggaccccaggattcanaaggaggactttnggcactcttatatcnactatgacnatntgccttcacacnacagagcagaggagacttgccttgt

SEQ ID NO: 1662 - DNA, 101 bp, Homo sapiens
  misc_feature (1)...(101): n = A,T,C or G
ttgacccttgcatggcaggagaaaattnantgcttgagtngttctctgacctccacatgcggtcctgntacatgggntgtntgcatacacataaacacaca

SEQ ID NO: 1663 - DNA, 160 bp, Homo sapiens
  misc_feature (1)...(160): n = A,T,C or G
gcctgaggcccaacctgcctgaggccaaaccggntctcttccaagattttccggagttatcttcgagagttcccactaaaaggttgatctgtctacttcaaaagaactttacttgtttagggatgggcctcccctcttctttataaagtgtgtttgctgg

SEQ ID NO: 1664 - DNA, 185 bp, Homo sapiens
ggaatgcctgaggactctgtcccctctgtttaaagtctccaggttagtaagccaggagggagcccgccacggccacctagtcagcacccttccctgcccgccatggatcacgatgagctaccccgggagggctgtggggtgggggcaggcataggtcaaggggaggggatggcaaaaaataaaaa

SEQ ID NO: 1665 - DNA, 347 bp, Homo sapiens
  misc_feature (1)...(347): n = A,T,C or G
aagagatggaggggcaagttctgagtgatgcaactgctgcggantaggagctaggaaccagttttacatcaaggaagttaacaccgtgtgtaaagaagatgggcagtatagcagtccacacaagtggccttggtgaaaagactgccaggttgagtggcttggtttggaggaggtgtntttnttaacgcttnctccagctgcagtggngcttaggattctgctggtacatgacgcacaattctgaaactcactcatgacttaagcactggagaccttcactggcagactggngctggcgacgctgggaggctgncgctgntgcactctnccccacccgcctaccacag

SEQ ID NO: 1666 - DNA, 251 bp, Homo sapiens
  misc_feature (1)...(251): n = A,T,C or G
acgattcaggaccatnagcaccatnagaagctcctgctctgtnagcatcattnctcccagncctcaaaccttgtcccttctgggnaccacncgagatgcccctacgcnagaatanncnggctntnctctgtctctncaagncntgagnccttngngggggagaactttattnncttcagntgttgtctgncctccacatgcgtcctgtngcatgggtgtatgcatacacataaacacacatgcacacgttg

SEQ ID NO: 1667 - DNA, 150 bp, Homo sapiens
  misc_feature (1)...(150): n = A,T,C or G
tcacagtggacccttggattacccccccttttttgcatggnttgagtacgccttatcacatattgccaaanacntntgaataaagagatgctcaatattcataacctgaactattacagttcaaggacattgcttttccaaaaaaaaaaa

SEQ ID NO: 1668 - DNA, 241 bp, Homo sapiens
  misc_feature (1)...(241): n = A,T,C or G
ggcccttaatacacacacgtgcttntanttggtataaataacgtnattgngcagaccagaaacntgcgacaacttggagggacttgcagtnggtttcatggngctgaggcagtgaaaacntcacccactgccatggttttgcactataagcgcctgcatnagtaatntttaaaaacatntancacagtaanantttcnaaantcttttctatgcnagcttatctngttaggcattatttta

SEQ ID NO: 1669 - DNA, 117 bp, Homo sapiens
  misc_feature (1)...(117): n = A,T,C or G
cctgcaacatcctggccttttctgcagaaagaactganngctttnggaaactgtaaagcttacctctgnggaaaaaccccaaagcattgtttcaacacaggtttccttaagttaaaa

SEQ ID NO: 1670 - DNA, 125 bp, Homo sapiens
  misc_feature (1)...(125): n = A,T,C or G
agtaccgtgaagacatggcnagtccaagaaccacacctacctacacactattngcagatgaccagtgtcctgtgctgtttttacaaataaacttgaggcaagatcaaaaaaggaaagaaaaaaaa

SEQ ID NO: 1671 - DNA, 171 bp, Homo sapiens
gaactgaggaccagttccaggtaattgcatggctgctgcattcccgtgaggcccctgtgagcggcatgggaaggcttctccatcacctcctgcctccccccaggtgcctgctcttgatcaaaccaaatcaaagcgcaaacaagttccagcgggaaagtttaaaaaaaaaaa

SEQ ID NO: 1672 - DNA, 415 bp, Homo sapiens
  misc_feature (1)...(415): n = A,T,C or G
aactgagctcttcacatatggtgctaaagatgtctactgtcanctcanacctgtctggaagtnntntcagaagactaatgcgacctgaanttcctggggagggtanagtggctgcagccncncctgtgtancggattntatatngctgatanattgactacaagcccgaaaanggnataanggactgtgggnncccaggnatggagctgatttcaggnatgnnactaccagctctatcancatttnngactgcanacgactctaatgctttggacttgantgcatcttacccgccngacctttccttatgtatctgaagagaatncccttgcccnctctgcttgcaaccgctctgcaanctctgatctcaccgaagttntnggngttccatattttnctcattcccctacaagtt

SEQ ID NO: 1673 - DNA, 356 bp, Homo sapiens
  misc_feature (1)...(356): n = A,T,C or G
taaaaacatgcccctgaccctcttgccaaatgagtntctgntcatgaggcccaccaagatgaaccanccaaggagggntcgtgnnctgccctgtacgaacantgactgctgacngtgtgatgagcaagctgagggtnctgaaatgttgtctgccaangnccatgaaggaagtggnctcacctggtcaccccanganggtggcanactggcttgctggancatgctnngccagaatnctgtgancctctcggaccncttctcaggccnggacttattnaacctancccaagangatattnanataancccccantgtcccgagtcttntctganaatgngtccaccaacatcttaga

SEQ ID NO: 1674 - DNA, 346 bp, Homo sapiens
  misc_feature (1)...(346): n = A,T,C or G
cccggacccaccctttggactccttgganaagcaaatggaaaaggcgggggtggnacaacggggntgccctatncctgnngnttgaaatgatagtgagcgttgttgtcccatagcctgtcattggacacagtaatgattctgggtagaacacagagcttccccattgttgaaagcttagcaggatccttgctacaagtttatttacctctagaaacaaggtcagtcatgcagaggaaggaaagtaaccctttccgtgccagacactgtactgagtgctcacctgtttgagctcctgcagtctaatgctttcttaacacttattaatcacaataggaagctgggtgt

SEQ ID NO: 1675 - DNA, 119 bp, Homo sapiens
tcgggttcaaacgtttgctgagagatgccgtggtaaccatgacgccacaatggaacattcttcccgaggcgtagaagaaactccgctgtagagctctgctgcataaggccacacagtgt

SEQ ID NO: 1676 - DNA, 167 bp, Homo sapiens
  misc_feature (1)...(167): n = A,T,C or G
aactgagaggccaacagaacacgnagagacattactgcntgtgtccatgactgggacnngactctgtncggntttccctgggaatccacnagngatcatgctcttcnaagaaccaatgctatgcaacanncncttcacatntcgagtgaacatcaatgtggaatgag

SEQ ID NO: 1677 - DNA, 313 bp, Homo sapiens
  misc_feature (1)...(313): n = A,T,C or G
gaaaagggtcatgcagnggcctgagggtggaggnataccgntaagccttncacgcgactgantgngggntgaganaaactttcntaatnggatnntgancatgccncttnatctctnnaagncttgataangcctannctctatntctaacaggctntgagtagannacctcatgccactgtccatncattgataagagcatgctacnnganagcgccatccttttgattcccttctccagctttctctcttaactgtatgnaaacactgcaaatgaagaacaccctggctaatnctaaggtaaaggctctga

SEQ ID NO: 1678 - DNA, 196 bp, Homo sapiens
  misc_feature (1)...(196): n = A,T,C or G
gagctgctgagagccgacnggaagcttnttgaacgngagccactgagaatggacacttggatnccacttnacccttggaaaacacacgattgtattcaangagggagaacaagngantggtattgatgggatcttgttttcagtanttaagaaagtcnaacgngaatggancgagaccccttgtatgcccaatgct

SEQ ID NO: 1679 - DNA, 272 bp, Homo sapiens
aactgagggtggagggcaaggtttggagacatctgaagccaagtcctgcgggccacatgagatcttttgcccatttccaccctgctgttcagtcctggttatcactcacggccagagctcccgagttacctttgctgctatgccagccccatgcaacagactgtccaccccacggtcagcctccacaacacccagcaacccggtagaaacaaaattctagaagcttataattaaggagtcggatttacgtgtcaataaattttcagttcaca

SEQ ID NO: 1680 - DNA, 459 bp, Homo sapiens
  misc_feature (1)...(459): n = A,T,C or G
aactgaggtggggtctttaaccctatatacccttggccggctaccgggaagactgcgtctcctgacgatcgtaacgaanatgtaccngtgctttccttntganagtnaannccgccctaatatgtgcancangctaaccgngnggaancttgcctgccagaaanaaancgcctgtngtnctattanggaaagccggngactaangtctgcttatgncaaangcccagnaatgtccatttgagatccangagccacnaagaaggggggctacttggccaacatggctgatcacgtgcctgaggcatgccctntgacctcaccagngtancacagaaccatccatacaggccttgggcagctggaaatttacactgntagctcncccatgtgctaagttaggaactggatttggattggcttgggntggactcttatttccaagactggtgagggaaacac

SEQ ID NO: 1681 - DNA, 277 bp, Homo sapiens
  misc_feature (1)...(277): n = A,T,C or G
acaaatctgtggtcataaagacagacagtttnaatgagaagacactgcaaatgtgctggaagacgcagctgtcctgagagggcacggngcactgncggttacagggtacaagtatntgtgaccancgagacccattagtccacactgctcgtcccgtgcatttttcctatttaaggcaaaaaaaatcatngagactagagtactttggaatttctagaagctcccaccttattctgaaattaaaataaaacccgtgctgttggtgtaaaaaaaaaaa

SEQ ID NO: 1682 - DNA, 117 bp, Homo sapiens
gggctgcctgggctaaatagtggattcaagaccagcctgggctacataagacactgtctcaaacaaacaacacaaaacatcatcattaaaaacaacaacaggagtgaaaaaaaaaaa

SEQ ID NO: 1683 - DNA, 124 bp, Homo sapiens
aacatgagaaagtatagcttctaccattgagctcaatgcactgtgtgtgaaggcgctggttgctgctgtagggagagaatacaaatgggacaataaaagactccgaaccatggaaaaaaaaaaa

SEQ ID NO: 1684 - DNA, 112 bp, Homo sapiens
  misc_feature (1)...(112): n = A,T,C or G
cggaaggcatgccaaacngcttacgcttcccaaggcacaagatctttcccagcatgggaaagatcctccctccctccnttnttccaccatacactcaataaaataaaataaa

SEQ ID NO: 1685 - DNA, 258 bp, Homo sapiens
  misc_feature (1)...(258): n = A,T,C or G
aacatgagttcggccggtactccgctctgatcatcggcatggcatacggcgccaagcgctacagttacctanacccccnnncagaggaggngaggagaatancagcnnnngnanagaagagactanntganttgnancggntngngagagaactggcaggaagctcaagatgacagcattctcaagtgaggcgtcagcgagcttgcttttctctagtcgttgagaacgaataaagcttcattgtgtgaaaaaaaaaaa

SEQ ID NO: 1686 - DNA, 351 bp, Homo sapiens
ggaagagactgtctttgaaaccaggaatctgagatgatgttgagatggagatgacaggcctgcaaggacaagagaaaacatgtagttctgtgagctctgatgtcaaccttcctggacagagcctgcacaggccctagggggcagcatagagacctcattgagactagcccacagactggagggccccaaggccaggctgatgtgggctgctccgtcagcctgcctcctgtaagggacaagagcatcctctgataaggtgtgatggagcagggggcctgaggatctctgtgcgccttcctgctgctttggcaacaataaatgaagagtggctttgtagcttaaaaaaaaaaa

SEQ ID NO: 1687 - DNA, 179 bp, Homo sapiens
  misc_feature (1)...(179): n = A,T,C or G
agtggaaagcctggggctgaaaacggtgaggctcagngatgggacaacagcctacngtccagcaggctgnnaaanggggagaagctgnttgaagggnaagngatccagctggaggacgggaccacctgcnnacattcaccangtgacgatacngaaagagtntttctcctttgaagacg

SEQ ID NO: 1688 - DNA, 112 bp, Homo sapiens
  misc_feature (1)...(112): n = A,T,C or G
caacagaaacatcctacttggaaatggctgcnggctcagaacctggaancnngtagaanntagccctgnngtagntgagaaatccaacngggtggnccaccagttatacacc

SEQ ID NO: 1689 - DNA, 137 bp, Homo sapiens
  misc_feature (1)...(137): n = A,T,C or G
tatcaactgacaaaagnctgggtgatatgttctttctcccagngatgaagggattntctnctctagggttnccctcagaccntgnanacatctgnttttcatngaccatcngccccaataaaggaccctaactttaa

SEQ ID NO: 1690 - DNA, 400 bp, Homo sapiens
  misc_feature (1)...(400): n = A,T,C or G
ggctcttgaatgctgggattaaaggcatttgccactaccacttggctggtatctcttatatgctggactagccactgcaactgagaatccccctccacaatggcctntcttcaggaccttcagccctgccacacagtactaaacctcaggtgntcttcatgacttcttcatgctttcaaaaccaacaccatctagccgaatcttacacattaccaagnttggctggcagcatgagatgcagntttggccaccttgnatnacagcttttatgtgctgaacnctggggagataaccccctgaagattttaccntcaggagatgctggccctcttactgaactaatatttcangttctagctnacctgcaacaatttgtatcgntaaagcaataaagcaaagg

SEQ ID NO: 1691 - DNA, 516 bp, Homo sapiens
  misc_feature (1)...(516): n = A,T,C or G
gactgagcattcccgtggtttggtatggctatcggtggaaccctggttaagctggtttactttgaaccgaaggatatcacggcagaggaagaacaggaagaagtggagaacctgaagagcatccggaagtatttaacttctaacactgcctacggcaaaactgggatccgggacgtccatctggaactgaaaaacctgaccatgtgtgggcgcaaagggaacctgcacttcatccgcttcccgacctgtgccatgcacttgttcatccagatgggcagcgagaagaacttctccagcctccacaccaccctctgtgccacgggaggtggggctttcaagtttgaggaggacttccgaatggtaggttgggcttgcccatcttcgaacagccagctctctcatgtgatcatagtgtgctcatctcatgctaagacctggaccattaaccttgggacctgggcatgtctgtgcccgngggttcctcttccatatgataataaatatatgaccctttca

SEQ ID NO: 1692 - DNA, 197 bp, Homo sapiens
  misc_feature (1)...(197): n = A,T,C or G
tcaccctgagtgacggatgtgagataagagatacatgcggantgtganncactcatcncagttttgcatggntntgnntgngananatcacatnctctncctcntnatgtncctccggagacggatgtgagaaaagagttacatgcgantntgagtcagtcaacacgttttgcatggttaagttaaagaaataaaaa

SEQ ID NO: 1693 - DNA, 264 bp, Homo sapiens
gtgcatcccactcgattggttgaccgacttcttgagcgggtgagctcctgttggaagccttgctttatggcgctgtcccagtgagaagccgcttttctggcattcgccagcttcgggtcacatgcaactacttctcttcctgccgtctctgctgggagtttgtgaagttgtttattctgttacagcttgtttgactttcacataggccttatagtctaatacaattgagaaaaagagaaaatttatgaccttgaaaaaaaaaaa

SEQ ID NO: 1694 - DNA, 162 bp, Homo sapiens
  misc_feature (1)...(162): n = A,T,C or G
ctaaaagagcagcaaagaagttacnntgattttgcagtccaggccctgatgagttttgaagacaagtgaaggtacagtgggtgacagctgtgtccttggacccagcaaaagctaatgaagaaaataattggaatttaaaatataaatatctaataaatactg

SEQ ID NO: 1695 - DNA, 262 bp, Homo sapiens
gtcgttggtgctgccagggcgtcaataataaaaagagagcagcgttgggggataatgtcgacatttccactcccaatgacgtatatgttacagaattggacggctgaatttgaacagatcccttcgagaattgagacttcaggtcaactccacgcgcttggacctgtcgctgaccaaaggattacccaattggatctcctcagcattttctttctttaaaaaattgggtgggattaatattatttggagatacaaaaaaaaa

SEQ ID NO: 1696 - DNA, 125 bp, Homo sapiens
  misc_feature (1)...(125): n = A,T,C or G
aggccagggcccttgtgggacccagcagctcattcaacataaaagtatatttttgaagtacctaaagtataataacctcacctattatgccaaaattaaataatcangaatttacaaaaaaaaaa

SEQ ID NO: 1697 - DNA, 101 bp, Homo sapiens
  misc_feature (1)...(101): n = A,T,C or G
ggacctggaccgctggctgttccttctttgatcccaggcatgatttcagcttgtagaataaatgagaaatgcctgtnggtttaattaaaagaaccgcattg

SEQ ID NO: 1698 - DNA, 423 bp, Homo sapiens
  misc_feature (1)...(423): n = A,T,C or G
taacaactggtggagcccagagccctgggcgaggatatggctgtgtgcctgaggaccttcacacaggcacacagtgctccacctgtcttcttacggctggcaatgagatggtgctccttacaccgtggaccccccgaggggtcttnctcaccaccttcagccggaaagtgcctgaccgtagaacttcatgtgtattagttgctcctgagaagaggaagagctgttttgatacccgtatctttcgaggtgtcagtccatggtctttggctccactgagtccagggtcacagcaagcctaaacaggatggtgggctagacctgccgaggggcagacctcgaagctcacagcagataggaagctcagagataagactgaagacaagcttcagtgtacttacatataataaattaaatctttaaaag

SEQ ID NO: 1699 - DNA, 396 bp, Homo sapiens
  misc_feature (1)...(396): n = A,T,C or G
tctggctgtcctggaattcattatgcagagtaagatggcttganactcacaagagatctaactgcctctgnctcttgagtgctganattaaaggtgtgtgacaccatgcctaagtgtcccaagtttaaactttccagcttggaagtaaatgaccaggaaataatacagtgaggattccagcagagatcacctccccaggcatcctaactcccaaagtgagagatactctcctgttatcactcaatctccatcgacgaaggagccactctaccactctgggaggtgaacaacggaaacagacacagaagcagactgcccatctgatggggcagttatgtcaatggatcatgaacaagttgagtcacaagatggaaccaggaaggcaaaggcccctga

SEQ ID NO: 1700 - DNA, 217 bp, Homo sapiens
  misc_feature (1)...(217): n = A,T,C or G
cttgaaggagtacaggaaccacccaaccctgcaggtctncttgtaccggtcctggagacattcccccaacatcacctgcctgttacaggtctgcagcatagtcaccacctgggccatgattgcatttctcctgggaagacccatgccctgagagcagtgagccacctcagcttctgtcttagtctctggagatggccctcgtggctcgtttgtattt

SEQ ID NO: 1701 - DNA, 184 bp, Homo sapiens
  misc_feature (1)...(184): n = A,T,C or G
tcactgtcgccgcccacagtgacgncnnccacagaaagcacacaccgtagttgcggacggcctgtggtnaagatgtctttgccatccccacaggacggacggacnggantccacaaggtgcgcagtngtcnccgaggccngccnnganagganccgattcctcacaggaggaaggagcacgccc

SEQ ID NO: 1702 - DNA, 185 bp, Homo sapiens
  misc_feature (1)...(185): n = A,T,C or G
ccattgagccaaagaaaggccacccccccaacagcccccacacctggataanagcgccctgcaagaacttcttntggaaaaccttctcctngtgcaagtnaccccancctgggcatagcaccctggccaccctgngagatgccaacggagacctgaataaagactgtcaatcagcaaaaaaaaaa

SEQ ID NO: 1703 - DNA, 300 bp, Homo sapiens
  misc_feature (1)...(300): n = A,T,C or G
ctgaagagctaccatttggntgctgggatttgagctcatgacctncnnaagagnctgnnncggngctnttacccnctnaannatttcaccagacccnctgatcctccttntgcgnatnctgctacctgctganaggcccgggagctcttntggagactatgccctatcctacgtcatcacctgcagctggttccaggctccaaggatgaattggcgggaatggactttccccccttttttcccccctcttttctaaagcgtgtctgccattaaaaatttgaaccttgagcaaaaaaaaaa

SEQ ID NO: 1704 - DNA, 152 bp, Homo sapiens
  misc_feature (1)...(152): n = A,T,C or G
ctggtgatgtccctccctgggacacatccagaggggtgtgcaggagtccaaagaaccanggactcaggacctgcgggcagctgacctctgctgctgtcactgcacagaaatttttaaatgacttttattaaatccttacaaaacagaaaaaa

SEQ ID NO: 1705 - DNA, 247 bp, Homo sapiens
  misc_feature (1)...(247): n = A,T,C or G
acgactgggcttcagtgtgtccgtgggggagtcagggtcaggcggacccgaggtctaccatgacacacgtgtttccgncgggcacgcatacacncacgtccctgaccatcctgttgccgagttggtgcccccggnccttcagtgaccccccccacacttngtnngagcagnggccctgcctcanaatgggcagaccttttaggaaactnggatcanacgngactcggctggcaccccactggtgccg

SEQ ID NO: 1706 - DNA, 228 bp, Homo sapiens
  misc_feature (1)...(228): n = A,T,C or G
tgaagagcagttttgtccaaaaagaacatcatctccagcggagaaagggcagctctgagcctcgaggagagactncattgtnanctctcagactacataccttggnctnacaatgaaagaatccaatattggangcancangaaaggaactcagngcncctngcnccaggtcaangngtggacctcatagcctttttggtcagngtgtncctagggaaacataataac

SEQ ID NO: 1707 - DNA, 136 bp, Homo sapiens
  misc_feature (1)...(136): n = A,T,C or G
agtctacataccaagctccagnncagccaaggctacncaganaaatcctgtcttggaaaacaaccgnncnnacaancctccaaactgagnaatctgtatttagaacgattgctcattnttatgacaaataaagtag

SEQ ID NO: 1708 - DNA, 485 bp, Homo sapiens
  misc_feature (1)...(485): n = A,T,C or G
aactccctgtggttggaatggcttctctctttcattcagagggcttctctggatcaagccaggcgaanaagctgagactccaggcatacaactggttatccagggagctggaccttcactccgacttccagctctccacgcgctgctcaccgtccctgtcccagacaggaaacagtaactgatgctggaacacaggctcgtgggacccgcccactaaggatctctcagccaccggcagccacagccacggaggagctctttgtggtcttggcttttcaatcaaggtttgtggccaaggctagagaggcagctctcaccttcaatgaaagcatctgggtctcagtcaagattgatctgcactcggatggattccctgtctgccagacaaccttggaatccattagggccgggatagagcacgatggaaggggaaggcgctaaggcacgcaacatgtcacgtgacaccagcagtttccgttccctct

SEQ ID NO: 1709 - DNA, 558 bp, Homo sapiens
  misc_feature (1)...(558): n = A,T,C or G
ctgagagtaccagtgatggggactccagcctctgtcgtgagcgagccacccctgtggcaggtttcaacacctcagacccggggccgcaagcaggcctctgccaacatcttccaggatgctgagctggtccagatccagggcctgttccagcgcagtggggaccagctggctgaagagcgggcccagatcatctgggagtgtgcaggggatcaccgtgtagctgaggcgctgaggaggctgcgcaggaaaaggccgcccaaacagaaccactgcagccggcttagagtgccggagcctggttctacagcgtctgacccccaggccagcaccactgacacggcctccagcgagcagtctgggaactcccggagaacaagtgctagagccccccggaactggaataagccaggccccacaggttacctccaccagatcagacactgactggtgaaggggtggggaggtcctccccaaacacttgcagggactttggccaaanggcttatggagttgtaaaaaggacatntgagcangccctttgtaggtgaaaaaaaaaag

SEQ ID NO: 1710 - DNA, 221 bp, Homo sapiens
  misc_feature (1)...(221): n = A,T,C or G
attgtgctcagcacagaggtgnttcgtgaccnngactgtacttctnaatgcntgcatggatgccagacaccncgancngnaagcgtncntnagngctncagagcttatgnagtgntaaangattctcaagtggncatctgacccaccatgatacagntctgactgttgctaccacccntaggaagaaaacgctgagtcaccngaaaccaaagaaaaacaaa

SEQ ID NO: 1711 - DNA, 181 bp, Homo sapiens
  misc_feature (1)...(181): n = A,T,C or G
gctgggaattaaccttngnacctgatggaanaagcggcgagncaaccacaacccatcgctcaagccccattgctgggcctggtgacaacgcatgtcagtcctgcctcagccccctgaatgcatgtttacagatgtgcaccagagcacctgactcaagttttaaacgatcattttgagcact

SEQ ID NO: 1712 - DNA, 457 bp, Homo sapiens
  misc_feature (1)...(457): n = A,T,C or G
aacctcagaaaaaagtcttcaaggctcggaaaacaatgagagcngagcgatcgccagcagctcgatgctgtgcncagagtcaagggggagctgctgagagccgacgggaagctgctgaacgggagccatgagaatggagacttggatcccacttnacccttggaaaacacagattgtnttcaagatcgagaagaagtgaatggtattgatgggattttgntttcagtcagaagaaagnncaaccgggaatgggaaaagangacccccttgtattgcccaatggtttgcctgtnataaaacaaaaccnngaagattttgaaatagtngaaggctttttgtccccccccantttttctatanttnnatnnccntaacanaacngggggggggngggggggggttcngggnccttntnaannggttngntgntcccccttttttttgtctagtggggggc

SEQ ID NO: 1713 - DNA, 237 bp, Homo sapiens
  misc_feature (1)...(237): n = A,T,C or G
gctggcacggagcatnctatggcatcgtgagcctgcagctgatctccggggtgngtgctgagggnaccatcacatacngctgttccacccagagtgcanancnctcactctangactcaggctagaactggactgcacagangaccctcccncnangataaatganacttanancccntntttaccanttgcggatctataaaatngnacntaactatactaccaataaacaaataa

SEQ ID NO: 1714 - DNA, 348 bp, Homo sapiens
  misc_feature (1)...(348): n = A,T,C or G
tatggcatccaaactgngctnntacaagtgccctgtctgcttncagnactnncacngaaatgtcaaagtccaccntggttaaacatttcttgtantccctagtccgctnaaacaacagtaaaacgttggnnccntgancanntgctaaataaagaaatatntgcgtgncnnagccttaaatttgctatatcctgtntcaatctactgctaacatagcgtcntagagaatngnagctaactttcaaatatgnntctaaaatgaccagaatcagccttccaaatgaagaantagcaacgnctaatgctgcgntgattatctgggacagngcatgacataagtagggcata

SEQ ID NO: 1715 - DNA, 101 bp, Homo sapiens
acgtcccactgagtcttgcccacctctcccctgaaacttccgcgtctaataaaaagtaatgcgtcttgggaacacccaaggttggtcatgtggcagcataa

SEQ ID NO: 1716 - DNA, 246 bp, Homo sapiens
  misc_feature (1)...(246): n = A,T,C or G
gctgtgaacagcttacccttgatcgtgatgccgcagaaacnncaagagagaccttgtctcagtgacgtggaagangaatcagtgccccnnaagtngnatcctgaccttcttttgccatagcatgtgtgagcctgnactcaccccttcccttaataataataaaacaacaactttgtganttgngacnnatnnanncatagcatgngtgagcctgtactcaccccttcccttaataataataaaaca

SEQ ID NO: 1717 - DNA, 294 bp, Homo sapiens
  misc_feature (1)...(294): n = A,T,C or G
gcccacctgcatccgcttcggcttttaaatgaaatcacctgcaactcccgccgncggcaccgaagngcagaagatgcccaggtttccggagcaacagctcagngtcatctatctccgccccgcggcgcctttcccgccaaaggccgttaccaccgcggagcatggtgggacacagcttgcaagataggtttcacccaatctttttanagcgccnagctgctttcanagagggtctacccccgaggtggccgacgattctggactcagtggggattaataataaccgctttaacc

SEQ ID NO: 1718 - DNA, 106 bp, Homo sapiens
  misc_feature (1)...(106): n = A,T,C or G
gaaaagcgcagggcccatcgaccactgaagacaacgggagggagctggaagacggngatggnctgganatcantgctgcactcttcctgngagacgattgaagcct

SEQ ID NO: 1719 - DNA, 347 bp, Homo sapiens
  misc_feature (1)...(347): n = A,T,C or G
gagcctttgaagaccagatanctaatgaactctagatncatccatggttgcntcngntnccttcntannnatggtnncatattanngancgttnggnccntccngcctccgagcccaggatgcacctggatgaaaacaaaatcccacgtgactggccctgagctcagatcatcatggcgtctcccagtgggaagggatcttggacgcccgaggctcctggttttgggccgcgggcgctagcacgggacctggtggactcggtggacgacgccgagggcctttacgtggctgttgagcggngcctctgtgcaacaccactcgccggnggtgacttgcgccaagtgcgt

SEQ ID NO: 1720 - DNA, 472 bp, Homo sapiens
  misc_feature (1)...(472): n = A,T,C or G
agctttggagaagcctctgaaggcccaggaacccggaggtgttctgctgagagtcgacatcatggatggggagagcagaggaggacacgaaggccaaggggagcagcagcagcaagaccctcagtcgacacattgcaggcgccccttatccnggtttagcctcactcagatccagtaccttacctttgccttcattctcgccttntgctggacacccggncacccggctccggacaccgccggatacggacagttaatatccagttctggtctcgagcctgggcaaattactggagcgttcgttgggtgtcagggctccgngagactggccacgcnctaattgtctcaccacgccctncacacacggtcgcctaggatcctcactactccaccatcgggtctctggcatatccacatctgtattgttgactgaccacacctcttaagccatactcctcgtggatggccacgt

SEQ ID NO: 1721 - DNA, 480 bp, Homo sapiens
  misc_feature (1)...(480): n = A,T,C or G
agcctcaaatgcagcctgcttgnccacctccttctccactcaggnccacagctctgcatccctacacttctctggntccggntcactgaaaaaacccaanatccacatgcccacggactcnttccccactgactnnatcccacctcctgtagagttcctaaacaatcccaanaaagcacctccagccaaaaanggaccccttgatgacttgganaaagaccctccaggngggnngnccanaangtgganctngcctccctgnaagagctcttctggaacatggcaagtccaagccaacaggctgggaccccanagatttcctctgggagctcacaatgctacatcaataacttanattacttactgcaanaaaagaggatgctggttgganaatttctccntgtccctgcangtcatctcnccagtgcatccgggtgaaactgtattcttncctaagcntcaccctttgccttgcttcct

SEQ ID NO: 1722 - DNA, 139 bp, Homo sapiens
  misc_feature (1)...(139): n = A,T,C or G
ctggaacaagaggggtctcancccctcctttgtggacttagcattacagtcnctaaatgtgtggacttgcaacggaaatcanattcaanaatcatgttcttgttggactactgaaaagcttgaaaagatttcatatact

SEQ ID NO: 1723 - DNA, 216 bp, Homo sapiens
  misc_feature (1)...(216): n = A,T,C or G
aggcctgcatgcttganccgttgcntccgccccgcggnagcacnatgtctgnatgccatcnccccacagctgganagggcagtgctgnagcagnnccttattgcatgnagccactcttanaattctctcagntgaagtggtgntttttattatatataangtacactgttgcngncnncaaacactccagaatnagggngtcagatctcattacag

SEQ ID NO: 1724 - DNA, 277 bp, Homo sapiens
  misc_feature (1)...(277): n = A,T,C or G
tgtggggttgctcactgttcttcttgaaggaggagtgactggccgccaccggcacctggaacccagcacccaggaggtgaacccggacggacctgaggaggatcctgtgtcctgtgtccttgggagactactcactggggcgagatgaccacagccaccactttnggggacgccgtcttctngctgancatgaccaggggagaggacgccctgtntaanagctctggagccatcgtggctgccatcgtggtnggtngtnatcatcattgtcaccttg

SEQ ID NO: 1725 - DNA, 363 bp, Homo sapiens
  misc_feature (1)...(363): n = A,T,C or G
tgtgcatgcagagaccacagatgtcatctgcagaaacaacggtcaccttcnttganacagagnctctnattgncctggagctgccaattagncncaactgcagccagcangccccagagcttctcctgtttctgcctccctagcactggggttaaaagtgcagaccaccactctgcacctttatttacatgggtccttgggatcaagtttaggtccttcaggctccagaggcaggtgcattacccactgttgtgggtgggcctgatgcagttcttgtgacccatcccctaatgaataaaggagccaatcactgggcaagtaggagggacttccaggntggactgaggaagagaggaagcagga

SEQ ID NO: 1726 - DNA, 291 bp, Homo sapiens
  misc_feature (1)...(291): n = A,T,C or G
cggggctgtctgttgactctgcccagaactttttcaccccaggtatctaaatccttgcctcaaaggtcaccactctctaagngagaccttccctcattgcctgcctgtaagatggaatgatcttccctgtgtcaagcttgcctcgtagccccttcttcatcctatttctgacttcttagccgaggaaaaatacttaagaaaagaattctcattttgttttctgctgtttccctgtacctagtacaatacactacacatggcaggaatgttttttttttaataaaacattga

SEQ ID NO: 1727 - DNA, 199 bp, Homo sapiens
catacctaacctatcgaggttcaagtcccggttccatagtttgcaaggaatgcagatttgaaccaatgactcaacgtctccgtgctacagattttgtagcatcaacccagcaccgacttcacagagctgtacagagactaaggactgctccatattaaaacactacatgttcccgctgttgttaaactatacaaaaaaa

SEQ ID NO: 1728 - DNA, 164 bp, Homo sapiens
  misc_feature (1)...(164): n = A,T,C or G
acatgtgacatccccaccaacggctgtgggtctgagcactgaaactcagagctntctggattgaacanatgtgtgttgttactgttgcacgtgtggcttgtgattttttgggggcgggggagttgttttgnaaaactatccccccccccatctctcaaaaaaaa

SEQ ID NO: 1729 - DNA, 290 bp, Homo sapiens
  misc_feature (1)...(290): n = A,T,C or G
tgaggaaaattcccaggtattcatgtaacagggaattgaggtaactaagaatgtctggcactgaagaagacttatgtcaccgcatgaaagtagttgtccgtgtacgtcctgagaacacaaaagaaaaggcggtgcagttctgtaaagtggttcatgtagtggataaacatatactcagttttgatccgaaacaagaagaaatcagtttttttcacagaaagaaaactacnaattttgatattactaaaaggcaaaataaagatctgaagtttgtatttgaaaaaaaaaaa

SEQ ID NO: 1730 - DNA, 252 bp, Homo sapiens
  misc_feature (1)...(252): n = A,T,C or G
taaggtcagaccctatgcatggggcggtagtataagctgggacggcntgctgccaacactaaggattggacctngccatatacacangagtncgagntcnaggaggcagtaaganagtactgagccctgagatggngatgtnagagaattgcttcctnnagcctctgagctgttatattnggcnnaacaagggatnactgatgttgnnncacaatgagcttgnctgcaccnaagancctggaaaaagaacag

SEQ ID NO: 1731 - DNA, 126 bp, Homo sapiens
  misc_feature (1)...(126): n = A,T,C or G
accaaagtacatattnaagccttctccagggaanagcccaggcacacgggctnaanatgangcngncngnannccccctcagagggagaatgtggtccagcaagatcanactttgcgctgtctgtg

SEQ ID NO: 1732 - DNA, 121 bp, Homo sapiens
  misc_feature (1)...(121): n = A,T,C or G
acatgtaccaacaatttatatnaacaaacaaataataacatnaatnacataagtgactnncaagcnangactacatagagataccctagctcaaaaaagaccaatagaatacaatggaaaa

SEQ ID NO: 1733 - DNA, 322 bp, Homo sapiens
  misc_feature (1)...(322): n = A,T,C or G
ttttaccatgacacanaactggcctggaggagctggtggcacggttgcagctggggccctgccccaatgatcacccctcgaggggtttgggagacagaggtgacccgggcttttggggctctggtgtggatccgttgtgacaagtatgcaggagacttgctgcagcttcctccagcagtccaggagctgcttctcagtttggtccgagatgctgccggcaaggaagacatcattgagtggctcggccattttggcatctntggtacttgccccaacccagagatcctgatctgccttgcccggcagcagaaggaaagcgccc

SEQ ID NO: 1734 - DNA, 413 bp, Homo sapiens
  misc_feature (1)...(413): n = A,T,C or G
cagggtgtgggtgacccatgtctanacgcgggattcggngagtactnacagncttnatccttacanangtgggcacatactatttcttcaggatncataggaanttncccngtccttatctcaanccttncctcaattcttttccntacaatacaatgatttcactataaanantaataactnaaaaagccgtngggngtncngccccngggagccggccaacctggagagcagaaatggcagactcaaatagatccccaagatccaggcccaagcctcggggacccaggagaagcaagtcggacagtgacaccctttttgaaacttcacctagtnccgtggctacnaggagaaccaccaggcagaccaccatcacggctgantncacgaagggcnccactaatcggaaaccc

SEQ ID NO: 1735 - DNA, 462 bp, Homo sapiens
  misc_feature (1)...(462): n = A,T,C or G
gctccactgttggtgtgcggggctctccagaaaccaattgcctgatccgattcattgcccagcagcgaaacctaaagaaggctgtgctctctccgttggcacgagagccccacttcgagggtagcccaagactgtatcgaaatgccagtgttttaagagagcagaatgtctgcttttcggtcagcttttcactccatacaggaaactaagatggccagcagtccctcagcagcagaggcagacggagagtctaggatatcagatttgaccagaaaagaagatcttcttgaatatcagcagtctgggttccctgtaaactcctcttcaaagcggaggagaatatcctcccaggacagccctgacaattatctnagtggcnccaaagcccttgctgacgaagcgtgtgctgggggtgcctncacagatcttgctgagaagtcacctgacatcggttccgcccag

SEQ ID NO: 1736 - DNA, 112 bp, Homo sapiens
  misc_feature (1)...(112): n = A,T,C or G
ctctgacctgctggcatgcgtggncttcgtggccaacaccttactctcagggcatgtcactctgtgccttaactcccgtgcagtggtttgcccgagagggttccgccttcat

SEQ ID NO: 1737 - DNA, 129 bp, Homo sapiens
  misc_feature (1)...(129): n = A,T,C or G
agccggtttggactgactggctgcctncctcctcctgcccctcctcccgcttctgcttcagatttanttattatatgtangtacnctgnnncagtctggaggacncactanacgagggcaccacgatct

SEQ ID NO: 1738 - DNA, 162 bp, Homo sapiens
  misc_feature (1)...(162): n = A,T,C or G
ggaccctctccatggcaacgggnanctcactgagangngagtgtancncaacagcangntgcnnatatgnagncatagctgatgctcccattatattatatagtgaccgagaaggcgtggaattattacccatacacnatnacagaatacactgggtgctta

SEQ ID NO: 1739 - DNA, 339 bp, Homo sapiens
cttactgtccctctgatgcggcctaggatgacctgggagtgggcttctgccctggctggtggagaattatcttgactaagtgcagggcagcccggaatggagctgaccagcacagcagaagccaggaagcgacttcccctccttgcccgcattcttcgcttcctttcgctggaaccttcgcaccaggcctggccagagatctccgtggaaaacctctggtacccaggcccagagacagtgaacaactgcttagatctctgcattcttcacttcccaccatgagctgtacccctgcagtgtgagccagaataaacctttttttcccttcaaaaaaaaaaa

SEQ ID NO: 1740 - DNA, 107 bp, Homo sapiens
caggatgctctggtctcatccttagcccagctttgaacacactgcttggacaggcttctcctgcctaagatttgacaactgttcagttgctgtgattaaaaaaaaaa

SEQ ID NO: 1741 - DNA, 107 bp, Homo sapiens; identical to SEQ ID NO: 1740

SEQ ID NO: 1742 - DNA, 107 bp, Homo sapiens; identical to SEQ ID NO: 1740

SEQ ID NO: 1743 - DNA, 235 bp, Homo sapiens
  misc_feature (1)...(235): n = A,T,C or G
atcaccctcaactatcaggntcggggtgctaggtttcctgancactgnagatnangctgncaagggcaactatgggctccttgatcaaatccaggcccttcgctgggtgagtgagaatattgccttctttggaggagatccccgtagaattactgtctttggctctggcatcggtgcatcctgtgtcagtctccttacactgtctcatcattctgaggggactcatggagcctgg

SEQ ID NO: 1744 - DNA, 101 bp, Homo sapiens
ccacccaacttggaaatatgagtcgtctacagcctctgctctagtggcataaatgctgttgtgtgcacaagcaataaaatcacctttgagtaaaaaaaaaa

SEQ ID NO: 1745 - DNA, 145 bp, Homo sapiens
  misc_feature (1)...(145): n = A,T,C or G
cccgtcacacaccccgatttcgaaccaagcactgaagtgagaaacatttgtttttaaacaacntgctctaatagtcttacatttaaaaaataagacgatgcttcctattaaacttgctattataatatagataattaaaaaaaaa

SEQ ID NO: 1746 - DNA, 175 bp, Homo sapiens
  misc_feature (1)...(175): n = A,T,C or G
ggttatctccctttccacatggggagcaggtcagacttgagacttcatctctttgtttttgcacgatataccngtgatgaacctcaacataaaatactgggtttggttaatccccaggacacanananaagagggggggtgtttacnttnagggaatccccgggggggccatctg

SEQ ID NO: 1747 - DNA, 401 bp, Homo sapiens
  misc_feature (1)...(401): n = A,T,C or G
gagccctgaagttgggattgggnctgcangtcaatcagacgctgcggntnntnattgatatccaagnaagcagagaatgtgaggncctcgntagctccatgagtgaaantcttccaggactctgtataaagcgttagtacttctanaagaaaagactggccacaagcctctacaccatcccagccagcatctgcaccaagtgactctggtctctaatatgctactttaacattcacagtgctggccatttaatacacaacatgtgtatcttcngaacaaaaanactatacaccgtgnccagccagcntctgcaccaagtgactctggtctctaatatgctactttaacattcacagtgctggccatttaatacacaacatgtgtatcttcaaaaaaaaaaa

SEQ ID NO: 1748 - DNA, 120 bp, Homo sapiens
  misc_feature (1)...(120): n = A,T,C or G
ggagagctaccctctnannggccgganccctactcagancgttangactatcctnanangtgcgatctcacctgattaatgagcccnacaccttttgtccancgcaatgaggatgcttca

SEQ ID NO: 1749 - DNA, 194 bp, Homo sapiens
  misc_feature (1)...(194): n = A,T,C or G
gaaataacactcaggagcgaccagggactgagcgagtggagttgaccggagcaagangaggncctaaaaattcaatnnccancaaccacatgaaggctcacaancatctgtacagntacaagtgtactcacatncataaaataatgaataaataaatatttagaatgatatcgngaaataaaggtcatttaatt

SEQ ID NO: 1750 - DNA, 118 bp, Homo sapiens
  misc_feature (1)...(118): n = A,T,C or G
catcgttgacctgccaaggagtgaccataaaggaannacgaacttgncntgtttgggcattaaagaaaacgtggtttnaanaatganactnttacctggcctcttccaaaacgacata

SEQ ID NO: 1751 - DNA, 255 bp, Homo sapiens
  misc_feature (1)...(255): n = A,T,C or G
gattccaatggagggagatgcccacntgagagatgggcgcngatcaaaagccccatctctctggattttctacacaaccagtatgaagacaaaaaggaagatctgaggctctcgaggctgggtgtggtgttgcacaccagtacttgggatgcagaggcaggtgaatctctgtgagttcaaggtcagcctggttacatagggagtttcaggacaatcaggactccatagagagactcggtttcaaaaacaaaacaa

SEQ ID NO: 1752 - DNA, 267 bp, Homo sapiens
  misc_feature (1)...(267): n = A,T,C or G
taacgttagccttacggctngaaattnaccggcanctgctgtgcatctgggccttgctttgctccagctngtcaganccgaagnccgagaaagtgnntcanancggncngatgggcagccangcnctgtncatcacaaanactcacacacngacttcaaganagcctttgggtcatcgctcccttttctgtcctttttgtgcattttaggacaccgctgtggtctgtccaagctgttctcaaaacctgtgaggtaacagaaaaaaaa

SEQ ID NO: 1753 - DNA, 373 bp, Homo sapiens
  misc_feature (1)...(373): n = A,T,C or G
aacacaggctttgcttcaacatgagcaaagtctctgcgcattcaaccccaaaggtctgacctaccttgcccagccgacagccgctgagggagtagctggactcagagagtgctgctccagtgcttttgacatcttgtctaacaaggcacccaggcttccccgtgggcgggggcggggcggngggcagtgaactttgatgaggggctgtggaacacagacttctgaactagactgcttgnncttcactgctanctctaacatgngctgctgcatanagagagttanacccctgcctctnnatcatactgaanatgactgntgaaagaganaatgaaaaantacctggttaaaaagagaataaacactaaaaacc

SEQ ID NO: 1754 - DNA, 145 bp, Homo sapiens
  misc_feature (1)...(145): n = A,T,C or G
gcctggaggaggtgcagcgcactgcctacacctntgagagngggntggggcctgcaacccaggccctttccaaganatctggcntggcctgcaaggcatctgcccaccccttaacagcatcctgcccgnttttctttgcctgtgg

SEQ ID NO: 1755 - DNA, 205 bp, Homo sapiens
  misc_feature (1)...(205): n = A,T,C or G
tcaacggccatgtccgatttgacctgcccccgcanggctctgtcctggcccggaatgtttncacccggtcctgtccctcccngcactagccctgctcgcnganctgngaggaagaanaggacagggctgtaccgaccggaaaagggggacctggaagagccgcccggccctaaaaatctnctaagaagaaaagcaggggggagac

SEQ ID NO: 1756 - DNA, 379 bp, Homo sapiens
  misc_feature (1)...(379): n = A,T,C or G
ccctcctggagacagatggaagctccttgggtcgacagattacagcttctggaaccccctactcccttcaactccgagatggacacccactgtccagggagaggatgcctggaaataacagctgggatctacagtggccaaagagttgtctccgtcttgctacatcgacaaactggngctcctgagtgaggattgngccctgggatggnggattcagttcnttcatttatagttggaagaagantnaagaggatgtagngtgtccntntttntattccatgcncagtgcnaagagngactgnaccctccaaanggangtnccgtgatggnncttcnaatgcntgcccgcangccgatgatcaaccctgcactccaaaag

SEQ ID NO: 1757 - DNA, 113 bp, Homo sapiens
  misc_feature (1)...(113): n = A,T,C or G
atctcacgtaccagatgctaacanaggangggnctgangcagcctggctgccacaggctgcanaaaggctcccgatggncatnagaccatatngaccgacccagaggccaccg

SEQ ID NO: 1758 - DNA, 147 bp, Homo sapiens
  misc_feature (1)...(147): n = A,T,C or G
catccaacgtgtgatnagcccatntctgtccanctgggggaggcactttgtgctgnncaccanntcaacctgcttaangntgatgacatcactgaaactntagngnatgggccngcctctgtaaaatcgatcgagagggcaaaccac

SEQ ID NO: 1759 - DNA, 169 bp, Homo sapiens
  misc_feature (1)...(169): n = A,T,C or G
aataattgtctccccgcctggccaatcagccctcttttcggcaatactncangctacctcagagcatcgaactccaagcacttnacantactggtttgnggantcncanaacnacccaaagancagccccnatnantncctttgnctgangggggatcccgcatacatc

SEQ ID NO: 1760 - DNA, 213 bp, Homo sapiens
  misc_feature (1)...(213): n = A,T,C or G
ctttttaaacagactgancaccgngtgcttctcgctcaagatgatctgatgtctgaagtggactctcactaaccatgatggcgacacagacgctaagtatagacagctatcaagatggacagcaaagcatctgagttcagttcccagaatccctggcagcttacaactgcccgtaactccagctcatatatatgtaaatcaaaataaaataaa

SEQ ID NO: 1761 - DNA, 176 bp, Homo sapiens
ccctgacgatttacaggagatacaggaacttattaatgtaatgagacaaactggtttcattttcctacaaaggaagaaaggattgtagctacactgtgatcttaagtaggaaatgtccttgtgccagaggttcaaaggaagcaccagccatcgtttaatgagctccgctcgagcca

SEQ ID NO: 1762 - DNA, 103 bp, Homo sapiens
  misc_feature (1)...(103): n = A,T,C or G
aagcttcacgggtaatgacccaccttggagaatgggaaagctttatnaagngggtagangagaattttcctgacactaaagaataccttgatgacattaaaaa

SEQ ID NO: 1763 - DNA, 380 bp, Homo sapiens
  misc_feature (1)...(380): n = A,T,C or G
tcctcatgcgggtgaagtatcttttcttttcctggctggtggtttttgtcggaagctggatcatntatgtgcagtattcaacctatacagagctatgcagagggaaggactgtaagaaaatcatatgtgacaaatacaagaccggagttattgaccggacctgcatgcaacagcctctgtgtcacagaaacactgtactttggaaaatgtctgtccaacangcccagcaaccagangtgtttagnagttnttgatnntctaccannngatgctnanngtnnnntggnacaagctnttcatnttgnctnnntanntgnnntggatncnntanctgnagtatcagctatatgatanaccgaccaggggaactactgctctta

SEQ ID NO: 1764 - DNA, 186 bp, Homo sapiens
  misc_feature (1)...(186): n = A,T,C or G
aatttgagcactctgtggctggctgacttataaattgacctgatangtaggtccttggactgngatgaaagaggcgcactgagacactaannctnnatggncttgggctccccgtccggncgggnntttctcgngagcagtagtgaanattggggtgcttttacaaagctctatagccaccatctg

SEQ ID NO: 1765 - DNA, 438 bp, Homo sapiens
  misc_feature (1)...(438): n = A,T,C or G
gactgagatttgcactggttagagtctactgtctggtctccttggtttctctagtccagaggatgggcaacccacacggagatacaagaccatttgaaagatgcctgattgaaagattggattgagctgccgattcctgtgagctgtactgctgatgtcctgacaatgcagattggatttgctccaaagaactatttctaaacaggttcttctttgccctattaatctttccttcccactacctctggtgtggngggctagaagggacattaaaacatttaagaacaacaaccctcgaactgtgaggctgtcagcttcagacaagagagactatttacttaaatggccaatttttgtttaaaatggccactcaaattaaaaggaaaagtgaggatctggagagaggctcancanttaanaacactgactgatcttcca

SEQ ID NO: 1766 - DNA, 239 bp, Homo sapiens
  misc_feature (1)...(239): n = A,T,C or G
gactgaggggcccctctgctcactgagancctggactttgaagagncaagnncnacttngttgccaggctcctctaactgcccnaaggatgaccttatccatctggccagtncttcaatgancacttncaccnaatanatggaattcncanccaacagatntttccccaatgatccctcacctggcggattgtctcatacagnaagacatcgtcaattcacctcactggagacacagtc

SEQ ID NO: 1767 - DNA, 170 bp, Homo sapiens
  misc_feature (1)...(170): n = A,T,C or G
ctcaggcctgctgtcaaaacacaccaatgtctttgtcagcattcaggaggcagaggcaggcagatcagctgtgagtttgtggncagcctggtatctacctcaagttccaggtcattcaaagctacataatgagaccctgatcaaacgaaatgaaaggaaacaaaaaacaa

SEQ ID NO: 1768 - DNA, 305 bp, Homo sapiens
  misc_feature (1)...(305): n = A,T,C or G
atccccatcttgaatcagagcagctgttgaccaaccacagagcctctggaagtcaggcctatcagcattcctgcatggaagantgaggaaggctcctnccagaagctgtatcaccagtgaatgatgactgggaanaanattggttggancaaaaggttgcntttgatccnccaaggcccttaaaattccacaaaaaggtggaatttnnttttgcttaaaaaaaanggggngggaaattttttnaaaaaagggtttccccccccntggggaaaggttcccggaaaaaaaaccccttttttccccgg

SEQ ID NO: 1769 - DNA, 297 bp, Homo sapiens
  misc_feature (1)...(297): n = A,T,C or G
tggcacagcctgatanaccgnnaganttcancactgttgnatgacaatatcacacancaaagtggtgatnggctcagccctcagagacctggcancatnnaacactattngtggtnggaancccacacnctcccaacacncattttgtgtcacagaaccagacgtntgactcctnaccttgggctngctggaccgcctttagaanagtggtagcctagtgtgnggtccggatcagacccatgctgatttntgcgctttnggatgnctgtccattttacctgacatttaaaaggcaca

SEQ ID NO: 1770 - DNA, 414 bp, Homo sapiens
  misc_feature (1)...(414): n = A,T,C or G
gcaggcatactgtgtaacagtntgtanactgaaaggcctgggggctatggagagagacnccggaaggtcngcccagctccggtcagcagacangctcttgtgcgtnccccttggaagaganggaggagcgaattgacacaggatctcatgtgcaacantctancttcaaacttgctatgtancccaagatggcgacctcctgatactccttccagttcccaaatgtnggggtttcacgcaagcaccgtgcaggcacagacatcatacatctgctacccaggagactgacctcanaacaggacggagacaaaaggttctccaaggaaagttccagcagagggaggaggccacatcatctcagaatcatcctaggagaacancaacgcattncatgtcctgcttcagaatgctaac

SEQ ID NO: 1771 - DNA, 172 bp, Homo sapiens
  misc_feature (1)...(172): n = A,T,C or G
ttttattcccccatgctgggcatggaggaaaggccttgctatgccacanggnggngnggagncgncctcacattgggcattntaagatggnactgacngctgggttctaaggggtaaacatagtctgcncacatgcaggggcaggtntcccaccatgtgttctgcctttccc

SEQ ID NO: 1772 - DNA, 279 bp, Homo sapiens
  misc_feature (1)...(279): n = A,T,C or G
gcgcgccaacttcacaacttccctntcccgtcacaggggntctatntnccccgccngtttggcggaaggatnccgcgcgcggnggcgganncgngctnanccgtctncgcccgggctncgncccacccccaccccacaggnccagaggttnacaagnnnntaagctttngataatgngaagctccaggtanagaggatgcctgccggtgagcacattacagctnttgtcgtttctggtgtatgtaatatttaaggttgaaaaaataaatctcaaaagca

SEQ ID NO: 1773 - DNA, 363 bp, Homo sapiens
  misc_feature (1)...(363): n = A,T,C or G
gactgagatggataacgaccagccgcctgtggtgactgccaccctgctggtgccccttcagaacggnagctgcncngaagcagntgaggccctgctgccccatggcctgatgggattgcatgaggagcacagntggatgagcaacaggacagagcttcatnacgagctgancnctggagaggtgtncaccgacagcatcttctttgncgctttgnggtngntntccatctttggcaantncntngtatgtctggncatncaccgcatccggaggactcagnccaccaccanctacttcnaggngagcatggcgngtgntgaccttctcatcagctgtagncagnacnccgattgtcgtgctgc

SEQ ID NO: 1774 - DNA, 152 bp, Homo sapiens
  misc_feature (1)...(152): n = A,T,C or G
acatcctatgtggatgggggccancttagaacaccttagnatgttnaggatatngctttttagaagcacagttntatataaagggtcctataagnggcccanatagnanatattantactgnctttggttgtgcaactatgttgcttttggg

SEQ ID NO: 1775 - DNA, 351 bp, Homo sapiens
  misc_feature (1)...(351): n = A,T,C or G
actgtatgattactccgtgnnnnngtcagaggatnggctgaacaggttgaataaggaggtaacaacaacagaagcggtagagactacagcctcttcatacagtcttcatacaagaacttatggaccctgngaatcctgtaaccacgaaaccagtgaccacagaaccagtgaccacagaaccagtgaccacagaaccacagagtccaaatcagaatgatgccatgtccacgctgcagagtcctgtgtcctgctttctgttatgnaccctccttcaaggaggggtacattttatgtagaaggaagagggcancccctggccttggtggggngctataaagtaattcttaccag

SEQ ID NO: 1776 - DNA, 358 bp, Homo sapiens
  misc_feature (1)...(358): n = A,T,C or G
gtgattcctggagatatctgcgtggaaaagcctgacccacagtcctgtgtctctagccactggcacctgaaggattccctggaactttggccaaggggtggctgagggtgtgactcgtactgggcttccaagagccaccaanctggaggggccagggacaacataaggaagcagtaacatcgttntgngatgtcacctacaaaaaaatgncacaanccacannanctgctgttntggagatctgngcaacatctgnctggnggaagctncgtnacccncttgtgcatcttggctgctntgttaccannctgncctggctcttgccaggactgtacanctgnagggtgggaccgagggc

SEQ ID NO: 1777 - DNA, 448 bp, Homo sapiens
  misc_feature (1)...(448): n = A,T,C or G
gagttgctgaactccaantactgttgaggctacccntgnnannaacatncacggncgcggggggnngngcttcttacaanaagccctgcnttctgntaaaggctggctagtagtcctgctgtacaaatagaaaattaaagancctctacagggaggcggttccctcagaaaataataanacatacaagaaatatatatccccancgtacattcaagtcctatggngggngggctntntctgcatgcaccattccacaggctcacttntgatggggcaccctgcattcatcncccactactccctgttnctnttctggnaccccaancatgaactgganctcccacatctcacagtganngctggacccagtccacccgggacataaagctgcaaanagctaccattctatgnaccngtnggatgaactgatcaagcccaccggtctag

SEQ ID NO: 1778 - DNA, 183 bp, Homo sapiens; identical to SEQ ID NO: 12
  misc_feature (1)...(183): n = A,T,C or G

SEQ ID NO: 1779 - DNA, 110 bp, Homo sapiens
  misc_feature (1)...(110): n = A,T,C or G
catgttttatttgacaattcctgcggcgtntaaagtgaangtncatanncccctgngcccgcgctcggtcactcagactcacatagntttggctgctggctgcgttccca

SEQ ID NO: 1780 - DNA, 201 bp, Homo sapiens
  misc_feature (1)...(201): n = A,T,C or G
atgcatgactacagcnagcgcannnccnaggnngaggangccgaggtntacgcagttccttcacangtntgnatnnattgcctactgtgtgccannctgtacaagtctttgtccttgggctcctgctaacagattttaaaatgtaaatcgacaactgatgggtgaatgtgaatttgctactgtgaataaatatagccagta

SEQ ID NO: 1781 - DNA, 128 bp, Homo sapiens
  misc_feature (1)...(128): n = A,T,C or G
cagctggctccaaaggtttgngggntcattcatnnctctgacctcactgnctgaataaatgaataaaattccaaataagcatncttgctctgaccccgggcctaaaancggngatcctggtggggctg

SEQ ID NO: 1782 - DNA, 377 bp, Homo sapiens
  misc_feature (1)...(377): n = A,T,C or G
agggtctgctcatccctgagtcagcagaagcgaccggcatcagccagaataccaggagaagttctttgatgcgtttctctctatgaagtgaagaccagcgaagcattgtacagtgtatcaatgcaagagctgtctccccacagttngtggggttccatttatattctttctaaacatcacaagccctctcaagtgtctgcagcaaaacatcacacagccctctcagaagacagcgtccaggaaaacatcacacgatacaagggagttngctaaaganaccagaattttcccacttccatccagaggcaggtggatcttctgtgagttcaagaccagnctgttctacatagcanggtttcaagctaggtagggttaca

SEQ ID NO: 1783 - DNA, 140 bp, Homo sapiens
actcgggcaccgttctgacatttaatgtggaatttacatgatccctcacatcccatcccacggttcatccacatgaagattcatccaaggggaaaaccagagttcttggaagcccgagtccaaaacccaaagaaaaaaaa

SEQ ID NO: 1784 - DNA, 248 bp, Homo sapiens
agaactgaggtctgcctgggcttatgaagacaaagccccccaagaccaatgagcagatgccccagcagttggccaggatcatctgttgaacaccccctcaggtactccacccaccagtggccacagttaagctctggaatgtgctcaggatgatggacaacaaggacttagaagccgaaatacaccccttgaagaatgaggacaagaaatcacaggaaaacccaggaaagcccccgtaaaaaaaaaaa

SEQ ID NO: 1785 - DNA, 121 bp, Homo sapiens
ggtgcatgggcgtgactggtccaaaattttcgaaacaggaagagtaccctcagcaaatctgagcacattgggttgacaatcttctcgcagaggcagggtgatcaacctgtccttcatgcca

SEQ ID NO: 1786 - DNA, 281 bp, Homo sapiens
  misc_feature (1)...(281): n = A,T,C or G
tgaacttgaagcttgagttattganatcaggggcnaacatgctgnacccaacgagtgaaagggacctttttgaccaagaaaacatggaggagatctcccaactcgcttccctggagatgtctgggggatgtagtcgccaatacaaactcaaccagtcgtcctagaaaaacccagctacccagactccgggtacgttacggnagcgaacattnttcagggtattcggatccaaaggncgccagacaaagtcataataaattacggaagtgaacccctgcaac

SEQ ID NO: 1787 - DNA, 101 bp, Homo sapiens
  misc_feature (1)...(101): n = A,T,C or G
caggttctgaacagganctttgacgagcggcantcaaagagttaatgcttctggcctaggagatggcgtcnncagatnttnagancagcagctcttcacat

SEQ ID NO: 1788 - DNA, 177 bp, Homo sapiens
  misc_feature (1)...(177): n = A,T,C or G
tcctgcgctttgacgacggagggctactacaggcagnttctcttgagtcatatgacnattcttctttcctgccntggaaaccagtgaactgntnttcctgnnctatgnantatgaacngtatnacngtcngtgnagttatctgcatgaacctnctactagaattacctttttagagt

SEQ ID NO: 1789 - DNA, 367 bp, Homo sapiens
  misc_feature (1)...(367): n = A,T,C or G
agtggggtctttcatactgagccctggaanaggacaaaatcgctcaggagagactataaggtacaatgtggacattctcagccttaagatgtggaaatttagccagagctcacagcatgccgtggaggttgccgacaggacaccaactctgcagactgtgtcttctcagaaagccgcgaccagctctgaaaatcaaaccctcttcagcttgtgtcacctacggaacggacagccagtcagataaagaaaacaagagaacggtggaaaagctcagtgcatgttcagttgacattagaaaaatccgcaggctgaaaggatggggtgcttctagaggaagaaacctacgttgaagagattgcaaatattt

SEQ ID NO: 1790 - DNA, 102 bp, Homo sapiens
  misc_feature (1)...(102): n = A,T,C or G
ctcctgtttccagtgtgatcaatcaccaatacaaaggagttcatgtgacanctncgccacttttaatatgaagcacttattgaattataaaaaaagaagctc

SEQ ID NO: 1791 - DNA, 212 bp, Homo sapiens
  misc_feature (1)...(212): n = A,T,C or G
ttctagtgccaatcaggagagctgaccgggtaccaatttctttcaaggtgctcccaggtgaccatgaatatccaaaatgtagatcaaagagaacgtcgtacgagtggtacatccctaaaggggtcttaaagacgggctggatgaataagcacctgaacctggtgccggcgctggtggtcgngttctatgagctggactgggacgagcctcag

SEQ ID NO: 1792 - DNA, 337 bp, Homo sapiens
  misc_feature (1)...(337): n = A,T,C or G
ctgtcaatagctgcttggtnaggggccagcacttctggacctctgnctgcggcctgggacacagagcttatatnangnttncaaaancagatgtgatggactagagagatggttcatgccactaagagagatnnactgccctagcagaanaccanagatatctntgttntcagcacccatgntggacatcttaaaaccatctctaaatccggctctaggtgatccaatgtcttcttcccagactccaagggcacctgtactcaagtgcacaaacccacattttaaaaaaaaatatgtatattaaaatataataaaaataatctcaaaaataacaaaa

SEQ ID NO: 1793 - DNA, 255 bp, Homo sapiens
  misc_feature (1)...(255): n = A,T,C or G
tactatgggaagacccantgaatcnngggtggggcctttccctggactgnctgangagcgaagaaagcactctgagcnccncntncnnagagaggctgcggnctcggncnctcatgagctgcacgggaatgccagangaggnggccctttacctccagcggcccggagccccaaagagatgagcctccatcccctntggngtccgccattattgattacaccntgcccctncaccttttacctacttgaagcaga

SEQ ID NO: 1794 - DNA, 286 bp, Homo sapiens
  misc_feature (1)...(286): n = A,T,C or G
gactgagagagccgagtnntgtcnccacagccattggcagnggcacttgtatgcccctgncaagcngtctatcctgaggtggaggangnnnccctngngttctggctggtaaccagcacagtatcncctttaagcgttccaganggantttganancctttcctaantcaaaggtggaatatntggggatntgaanaantagagaatgcnaagcgctgacttaacgagatgccacgtnantccggggatgccacnctnacnatatttccccaaagatggaggcctt

SEQ ID NO: 1795 - DNA, 266 bp, Homo sapiens
  misc_feature (1)...(266): n = A,T,C or G
gactgagatgctaagccgatggttattccatcancacctgcccaccagtaatggaactcaccgaagcatacagccgtcctctnttgntcatggccagggnncangacgcagggacaacgcctgntgncagatgccgnnttnnggaaaccnagcnctgccnagaggantggactccgtgcatcaggatgagancaaagagaacngactgggactggccatgcacccnggngtcntcaaaacantaggagagggcagataaatccttg

SEQ ID NO: 1796 - DNA, 498 bp, Homo sapiens
  misc_feature (1)...(498): n = A,T,C or G
gacgtctggggagctcctgcattaagtcagactgaggngggnncttncatganncggtnctgaacnnnnngggngacgccntnccatggcctgagctgnantnantacctgncagatacctatnaattcatttattncaccganaanatatctacctagaggatctagatntcgtaccatggcataangcggnctgcacttgttattaggaagaataaanagctctgccttancaggtgttcaacattaatantacananaangcttaggcnncaagaccngttacctctcccaggaagcatgcatgcagcactgctctggtaagcagatgcatcctttcctgaccccgggcctaaaagcggtgatcctggtggggctgttcctcatggttctgatcctcctcctgggaacctctatggtctgcctcatccgtgtggttcgcanaaagcaggagcgtgcgctgcgcactgtttggagcactgcggatgacaaggagca

SEQ ID NO: 1797 - DNA, 270 bp, Homo sapiens
  misc_feature (1)...(270): n = A,T,C or G
gactgagtcgttctgccantctttaantgtctganttaccttgaaagangtgtggagaagtgcacagtagtcgccagagcggntaaatgcngagtcntcnttcagttcttcggnaagcatgggtnttaaaaagacctcacattgtgtntttccaagacagcccagccctttgaaaatttntctttcaaaaaagaggctggggngcgaaatatccctggatggtttaaacccaagncttggctggactgaaggcccattggggggtttttg

SEQ ID NO: 1798 - DNA, 361 bp, Homo sapiens
  misc_feature (1)...(361): n = A,T,C or G
gtgctgtcaccctactgnggncatcctgtttgaacacacgactacctatccctcaaccagatcgtngcgcatantaatgaagaaacacacaggaacaagtgctgaaaaccanattatnaagaacagcttgagcangggcccgtgatagaatgactcagcnaggtgttnttcactataaagcntgaccggtacccacatggccagtaccaccaacatcctangaacctgaatcctcccaaagacaggtgagcgctcgtgattctctgagcagnaagggaattttgttttgggtcttatttgccagctgagaaaatgcaaatggnatattcattaagatgtnatgcggggagaaaaataaaaa

SEQ ID NO: 1799 - DNA, 217 bp, Homo sapiens
  misc_feature (1)...(217): n = A,T,C or G
gcatactggagtgatctggcatagactcatactgtgttagaaaagggagcctggntcagncctctctggcaggctngcacctntatncttccttcttggaatcaagacatgggattatccttcctcctcccccagggtctcacagcacaggccctgctctgtgtgagngacctccttcagagacacttgccccatgcagctcgatgggttctggttt

SEQ ID NO: 1800 - DNA, 427 bp, Homo sapiens
  misc_feature (1)...(427): n = A,T,C or G
gactgagatgttaaagtgacaccaaggnagtagtgatgnnggtggntggaggctggtcatctaccttaacagcaaagacactaannagatgtntcaagatgctgcgccctttaccgatgtctgagttgtccacacttccatcctgatgtccttatgtgggtgaagatgatcccaacctgnagccaacacagaaaagcccataacctgtggncctcaccacctctacagcantgaaggtctccagngtcaccctgtggacccaccacacccagctgaagaaggctccaggagataacagagatgggtggtcatcaggtcctncaacttcctaaagataggactaacggggggcctattattatcgggtgncctttctttgntctttccattattctgatcattccaaatattaaccctttaaatactg

SEQ ID NO: 1801 - DNA, 362 bp, Homo sapiens
  misc_feature (1)...(362): n = A,T,C or G
ctgggcacaggccatagatacttcttgngnaactctcaaangttggattggatatcanggccgngntcatancaaaagtcngngcagnangcctnctngnacgntcnangncagggcnggagacactgancagccnatctggcctcagcaacnagcacctgacagtnnggacngtanagaaggctctcacggctgcnatcggaggctgcaaacgccgagnttnncggcccagcaggtnaacatatgggcagcaatgctgnngctgtcaccaccaccaccaccatagccactgtcaccaccgaggataggaagaaggactttaaganaaaccgatgnctggctattgggatacagggggacga

SEQ ID NO: 1802 - DNA, 235 bp, Homo sapiens
  misc_feature (1)...(235): n = A,T,C or G
gggcacccagacattctacctccaagaaaccacgctacagtcaccagataaaagtggctgccacaggtcacctggctgagcaacactgctggccagtcggaggttgcttgccagacaggagctgancccacctgcagccaagccttccagcactaaggtccccagcagtgggaagtactcaaacnggntgaanagccatcaagggcnaaacttgagggggggggggggcccaaat

SEQ ID NO: 1803 - DNA, 117 bp, Homo sapiens
  misc_feature (1)...(117): n = A,T,C or G
cgttaggggcaaaaacccagggcaaggatgggaaaagcaagtactcgactctcagcctgtttgacaagtataaagggaggtcagcaggcgcntgtcaggaaataaataagaagaata

SEQ ID NO: 1804 - DNA, 206 bp, Homo sapiens
  misc_feature (1)...(206): n = A,T,C or G
gactgaggacggtacacccagcaagaagtctangcagggaaataggcaanactncanttcngtgaatatttcagnggtnctatgtgnaggagccctgggntgtnctgaaacttgctctgtggaccaggctgacctatgcctactgaatgctgggatgaaaggcagtgcaccaccactatgcagcatttttttttttaaaagggccc

SEQ ID NO: 1805 - DNA, 239 bp, Homo sapiens
  misc_feature (1)...(239): n = A,T,C or G
gttaagaactgttcagataccacgaagtcatcatgtgacgtgacagataagtgggttggagggcatggagagctacgtcgtcgccatcgtcatagtgcacagaggggacttgaccgtgtgccgctgctcagactacatcgtgcctgcaaacgctcctcttgagccgccagaatttgagatcggtggctttacagaccacataaancgtgacgatgggaatttccaccttggacccaagg

SEQ ID NO: 1806 - DNA, 111 bp, Homo sapiens
gactgagagctcagagacaaggaagcagcagtcacactgggggccacagaagggccctcagtggcgtccatggctggcctggaccccacactgagcacaagtcacccattg

SEQ ID NO: 1807 - DNA, 120 bp, Homo sapiens
agcgtgagggttcaaaaaggattcttcgctccaatgagatcatccttccagccagtggcctggtggagacagagctccagttaaccaaattaagtttctcaacatataaaaattaaaaaa

SEQ ID NO: 1808 - DNA, 287 bp, Homo sapiens
  misc_feature (1)...(287): n = A,T,C or G
caaccctgaacccacnacaatgacattatgatggngcatntgaaaattcantcaaattctctaaaagatccagcctctgccttgaagatgacctgctctgaggagaatccaactgcnaattctgggctgggnaaganggaaatgggggcttccagnnccattanngngctgttnccatnttgngccccngagcagngtgagcgnnctnccctgnaagataacccaaannatggggggcgcangcgantgaaaaaaggaaccaattcctntcagggggattttggagg

SEQ ID NO: 1809 - DNA, 397 bp, Homo sapiens
atactccttgcttagttttaggccattgactatgcagcctagtgactggaatgatgtgaaaaaacctaagtatggtcacttgtcagagtctgcatctcaatatcaagaatctgttgacatcctggagctaggtcattttacctgggacaaatacctaaaagaaacatgttcagtcccagcgcctgtccattgcttcaagcagtcctacacacctccaagtaatgagttcaagatcagcatgaaattggaagcacaggatcccaggaacaccacatccacctgtattgccacggtcgttggattgacaggtgcccgacttcgtctgcgccttgatggcagtgacaacaagaatgacttctggagactggttgactcctctgaaatccagccaccgact

SEQ ID NO: 1810 - DNA, 277 bp, Homo sapiens
  misc_feature (1)...(277): n = A,T,C or G
actgaggaaagaagangatggagnagncgccgaatctgaggccttggctcccgtgtttgggaccaggagggaaggagagaagatagatttcgctgagacacttgcccgggtccctttgtgggtcagaatgggtcccgatgagaacctgagtgtgagagtgaaactacggagtatcatttgtagctttgttcctcaagacttgccatgagatttaagtagagcgcctgtgtggaaattgttaattgtagctagtcagatcgaagactattgacagcat

SEQ ID NO: 1811 - DNA, 109 bp, Homo sapiens
  misc_feature (1)...(109): n = A,T,C or G
tttgacctgctcctgggaanttgctgnntcgtaaaggcactncnntatggaactgcagcagccnncaaggacagcatctgctataacctacagaccgtgggggaggtct

SEQ ID NO: 1812 - DNA, 215 bp, Homo sapiens
  misc_feature (1)...(215): n = A,T,C or G
ttcctacagttccacctacctcgtgtgtacaaagctgccaccttncagncctcngggctggnctcctgtaggacctgngatcccacctccngactccagntacncccancttccacctgaanggggnctctgctngccaanatatcanccctgaattctcctaacaaaggtgtactgtctgactttatgactgacntccctgttaacccactttt

SEQ ID NO: 1813 - DNA, 358 bp, Homo sapiens
  misc_feature (1)...(358): n = A,T,C or G
actgactgcgagtcccccagttcccctggagatctagctgggagcccaggctgtgacaagacacgcggctgtgcaaaggcggttagacattatggaggagacggtggagaagacagtggagcacctggaggcggaagtgacaggtctgctgggcctgctggaggaactggcttcaaaccttcccacagggcccttcagccccaaacctgacttgcttggagatgatggtttctgacttccagggatggtggagcctgccagctgaagtcatccctcanagaaccaagccaggtcttcctgccttcctgccccacctttgtgtgaaataaaagctccgatttggacccaaaaaaaaaaa

SEQ ID NO: 1814 - DNA, 471 bp, Homo sapiens
  misc_feature (1)...(471): n = A,T,C or G
cactttcatcgcaatgtccgatcgtttggggcaaataacccagggcaaggatgggaaaagcaagtactcgactctcagcctgtttgacaagtataaagggaggtcagtaggcagctgtcaggtcctcagttattcctagacatggcttacagagtctcgggaaagttgccacantccggcggnngccacccgcctgcaaacctgccaagcctgaagtctgaaaacaaaggaaacgaccccaacatcgtgatagttcccaaggacgggacaggatgggccaacaagcaggaccagcaagacccaaagagttccagtgtgacggcctctcagccgccggagtcgcagncgcagccgggtttgcagaaatctgtctccaatttgcagaaaccgacacagtntatcagtcangagaacacaaatncagtgncaggtggaccaacantcatgggcnnaacagagtacaagtagtcg

SEQ ID NO: 1815 - DNA, 362 bp, Homo sapiens
  misc_feature (1)...(362): n = A,T,C or G
gactgagatgggaacagcacatcgtcgttttgggggaagtctacaactactcctgtgaaccagattcaagaaacaatttctancanttgtgtggtgatcttctcaaaaacatcctgctcttactgttccatggccaagaagattttccatgacatgaatgtcaactacaaggctgtggagttggatatgctggaatatggcaaccagtttcaagatgcgcttcacaagatgactggggaaagaaccgttcccaggatatttgtcaatggacgatttattggaggcgcagcggacactcacaggcttcacaaagaagggaaattgctgcctctggttcatcagtgttatttaaaaaaaaaaca

SEQ ID NO: 1816 - DNA, 135 bp, Homo sapiens
  misc_feature (1)...(135): n = A,T,C or G
ggatgcccctggggggttcgtgtatcgnggggtcaatgctctacaggccanantcacccttattgaaagggangtncctccacctttngttcatggcanaagantataagntganagctgtctgcggttcccttt

SEQ ID NO: 1817 - DNA, 174 bp, Homo sapiens
gaactgaggtattctcatgggagcagtaataaaagttatagagtttaaaaagctggcaaattggaaggaggaagaaatgtttcgccccaacatgtttttccttctcttgctcccacctattatctttgagtcaggatactcactgcacaaggggaacttctttcagaacatcgg

SEQ ID NO: 1818 - DNA, 300 bp, Homo sapiens
  misc_feature (1)...(300): n = A,T,C or G
atctctactgcctccaacacgccgaatcctggctgancttttacagcaaacagccaactggaacaagatgaatgtggaacagtaccctgcccctctggagtgttataatgagttgggacatgtctctgtagaaagatttgcccaactttgtcaggaactcatggatacactaagggcaataaggcagcccaagagcctctcttttgctacacgtatatgccacaaatgtggcgagccctgtgtctatggtcaggggggtagactttgtttttgctggcggngaacatggattcagaactt

SEQ ID NO: 1819 - DNA, 192 bp, Homo sapiens
  misc_feature (1)...(192): n = A,T,C or G
atttcgcaactgaaacttgcaatcatttcagggccatacccattaaacaagcacagtgccaggtaaaatgacaggcgaaactgcatccatgaatttacggagggactatttggttttcatttantacttttaccacctcattttatgtctccggcaaagccaaaggaaccaaacttactttaaaaaaaaaaa

SEQ ID NO: 1820 - DNA, 359 bp, Homo sapiens
ctccaacctgtcaagttgttggagatcctgcaatcgccgccgccgctgcagcagtcctgaaagcggcagagccatgcagtgagcacatccagcgaccgccggccccacagaggaaggctccagcctggaaaggaaatgctatgagatggcaagatagggacaagagagacagtcctgaggtttctcagtgtgacagcgcccaaaccagagttcaggtcccaactcacagccaggttccctcgtacgccccagcgcttcctctctaagccttagaagtgaaagtatctgggggttgggacaatcaccaagtatgtctacaaacggctttccttaaaccatcatcaataaagcgagcaaga

SEQ ID NO: 1821 - DNA, 327 bp, Homo sapiens
ggcaggcacagctcctctggcagacgtaggtcctggtggaaacggggttcaggggactccgcagccttcaccagcatgagccatccagaggagtcaacagaggtgacactgaagactgacgtggagtcaggagccagtggctacagtgtcacaggtggaggggatcaggggatctttgtcaagcaagtactgaaggactcgtcggctgcaaagctgttcaacctgagagaaggagatcaactgcttagtgcgaccatattctttgaccatatgaaatatgaagatgctcttaaaatccttcagtactcagaaccatacaaagttcag

SEQ ID NO: 1822 - DNA, 119 bp, Homo sapiens
  misc_feature (1)...(119): n = A,T,C or G
tgtaatggaatccgatgtcctcttctggtctgtctaagagatctacagtaaataagtaagtaaaaaagaaggaaagaaagacaagaaaagganagtgaatgaaagattttttaaaaaaa

SEQ ID NO: 1823 - DNA, 125 bp, Homo sapiens
  misc_feature (1)...(125): n = A,T,C or G
agatccccaactcccaccaanagccagctttangtgtnttaangacagtacnaccatcgagcatggtngctcctctgnatgnngggagatgatgactgtcncattgctgtgtgatggcctggaat

SEQ ID NO: 1824 - DNA, 362 bp, Homo sapiens
  misc_feature (1)...(362): n = A,T,C or G
gggatcgtttgcctaagatgcgaccatgccatccaggcttctccacaccctggcaagtttacacagcatatcaagcaaaggctcatcagtgccagagacttacttggcttacattaagaccacttaggaaatcctngaaagtacatttttgccacagggggcctgacaatacangctacattgacnctnnttatttgcaccntatgncngntgancagttcgganncgnnncanganatacctggaaanganncggataacatcangacacaagccagactctttgtcgntaaangctagnccatnnggttggacngcnaaaaacaccngncaagncnntgcncccccttttgggaatcaca

SEQ ID NO: 1825 - DNA, 186 bp, Homo sapiens
gaccggagctggctgaggatccaggcaggagctgtgcagcatctgagtcaggctcgctctctcccacaccccagagccgacctgcctgaacattcgaggttattcttagtaactctcaggtttcactctagcacactgagcatgctcaagtgggtaaatacagaaatctgtttttaaaaaaaaaaa

SEQ ID NO: 1826 - DNA, 101 bp, Homo sapiens
  misc_feature (1)...(101): n = A,T,C or G
acctgactgagacatgcagcttccctgtgcntcactaggccaccaggatatccacctgtnacctcncntggataaatgtttctgttttggaaaaaaaaaaa

SEQ ID NO: 1827 - DNA, 137 bp, Homo sapiens
  misc_feature (1)...(137): n = A,T,C or G
tattctcagaggaatagggaagaattnaggaaaatctgnnatttcctaccnngaccangcnncagaagcttcccacanncntgtaggcattgccgctcatcaggaagtcccgtcttacggaagccagttatcactta

SEQ ID NO: 1828 - DNA, 412 bp, Homo sapiens
  misc_feature (1)...(412): n = A,T,C or G
tgagcctgatgatagcagatcttaatgatggaaggtacacgcccatgcanccttgtgaancaactgggaccacanggncanagagtcccntgatacccangtntcatttnctcaaggacccagcagactgaggacatctgcaaaattcctaaggctagagngaaagactacagngaactctaacaccccagcaaggctccaccttctcctatcagagctacgggacacccaacctgggccgcacgcagtcttctctgcagttgggacaggnnnntnntctgnccttgntttcccacagccngtttttcannnctnanattnccatgctngtggggccctgnattttagnanatnntggancannctgtncctgggcggnccccagcgctcacctggaacagaggggagccca

SEQ ID NO: 1829 - DNA, 426 bp, Homo sapiens
  misc_feature (1)...(426): n = A,T,C or G
ggagctggggagaaggtgaaggcttgccatgntcannctggcccaagccattccagggactatctttngttactattgctgtgataaaacaccntgaccaaaggcaaggtggagaangangggttnatttcaacttacaactcttggttgactccatcactganaggatttgaggcataaactcaaggaacaaacctangaggtaggaactggangacatgggctnggagaagactgctcttactggtttggtnctnatggtttgcccagggtgctttctcatacaactnaggaccacccncgnagnggggccagaggtgcaccacccgtctgtaactccagnttcaggggataatctgatacctctttttggctccaagaacangcaggcatatacacataaatgcagggcaaaacattcatacg

SEQ ID NO: 1830 - DNA, 767 bp, Homo sapiens
  misc_feature (1)...(767): n = A,T,C or G
gtactgctcaaacggaccttcgaggacagattgcggagcgtctactcgagacagcagggtgacaagtctgcctccagttctctcactgttggatcttgagacaacaggaaaatgacttcccatgacccaaaggccgtcactcgcagaaccaaggtggctcccaccaagaggatgagcaggttcttgaaacactttacggtggttggggacgactaccacacgtggaatgtcaactacaagaagtgggagaatgaggaggaggaggaggagccagcgcccacatcagcagagggtgagggcaatgctgcgggcccagatgccgaggctggctctgcctccacgcccaggcagtccctggacttcaggagccgactgaggaaactcttcagttcccacaggtttcaggtcatcatcatctgcctggtggtcctggacgccctcctcgtgcttgctgaactcctcctggatttgaagatcatcgagccggacgagcaagactatgccggtcacggcgttccactacatgagctttgccatcctggncttcttcatgttgggagantttttttaagatcttcggcttncgcttagagttctttcaccacaaagtttgagaaacctggatgcctttgtggtggnggggcttttncgtccttgacctttggctnttgttaaaagcccccctctcnaaactcttngggttgctnanctgctttcntctttnaggggggccccccttaccaccgggntctccatctccgggaaaa

SEQ ID NO: 1831 - DNA, 456 bp, Homo sapiens
  misc_feature (1)...(456): n = A,T,C or G
ccttgtaaatgcaatggctggaagaccctaacccctctcctactccaccaagaggagacctgcagcagataattgtcagtttgacagaatcctgtcgaagctgtagccatgcccttgctgctcacgtttctcacttggagaatgtgtcagaggaagagatggacagactcctgggaattgngttggatgtggagtacctcttcacctgcgtccacaaagaagaagatgcagataccaaacaagtgtacttctacctattcaagctcttgagaaagtcaattttannaagaggaaaacctgtggttgaaggctccttggagaagaagccgccatttgagaagcccagtattgaacagggtgtgaacaacttcgtgcagtacaagtttagtcacttgccatcgaaagaagaggcaggacancgatccgagctggcccaagatgtttctgaaccgcatt

SEQ ID NO: 1832 - DNA, 137 bp, Homo sapiens
  misc_feature (1)...(137): n = A,T,C or G
acgattatttgcggaccagtcgggaccttgaccttgatctgatccnaagacaacncnaaaaaatggtctcntttctcctgaaaaccaaggagtaaatatcacaacttaccaaaagttgaacttggtggctgagcctc

SEQ ID NO: 1833 - DNA, 165 bp, Homo sapiens
gggcctggttctcagaggcatttggcaaagtgaaggagaagttgaagaccacgttctcctgagcacctggcgggccacctcgaagcatcaaggacatccacgtaatgtgccaggtccctcttcatcacacaccaataaaaaacgtgtagaaggcaaaaaaaaaaa

SEQ ID NO: 1834 - DNA, 285 bp, Homo sapiens
  misc_feature (1)...(285): n = A,T,C or G
gagaatggtaccacccacactnnacccncctnctgtnnntatgtctatataaatgtaatacnntgtagcctngtcngaacactanacnagggcnccaaatctcattgtgggtggttgtgaaaccacccaccatgtggttgctgggatttgaaactncagggatcttccaggaaaaaagcagtccagggggctcttaaacccgcttgaagcccatcttctcccaagccnncccnggccatttccctttnccttnaaagggggcattggaaattggaatccccccaa

SEQ ID NO: 1835 - DNA, 236 bp, Homo sapiens
  misc_feature (1)...(236): n = A,T,C or G
ccacactccaagtcgtcnccaaccanccccaccgcctgctccccncctnccnggncccctgtgttggaatattggaccncagngaccttcccnnnnctgnaccannccttggtggctgatctccttaaaaanaagtggactctgtgttccggaactttgnacntgaatggggacagtctnatcnccgaaggaggaatntctcatcctcttggggggattttccccttatgttcaaa

SEQ ID NO: 1836 - DNA, 356 bp, Homo sapiens
  misc_feature (1)...(356): n = A,T,C or G
gcacatgcctctggcacaccttcntggatctncccacancaganggacccaactgctcctcgctccacggcggctcctgcacttgcaccaactcctgcgcctgcaanaactgnaantgcncctcctgcaanaaaaatgctgctcctgctgtcccgtgggntgctccaaatgtncccagggctgtnttntgcnaaggngccncggganaaatgcacgtgctgtgcctgatgtgacaaacagcgctgccaccacgtgtaaatagtatcggaccaacccagcgtcttcctatacagttccaccctgtttactaaacccccgttttctaccgagtacgtgaataataaaagcctgtttga

SEQ ID NO: 1837 - DNA, 224 bp, Homo sapiens
  misc_feature (1)...(224): n = A,T,C or G
tcaggtcctggagaaaanaaggncancancccctggaattcgctttctgatcctctgaatgtttncccttggacagagagccacccaccatttgctgtccacttacacagttaaacaaaagctatgctcagttctactgcaaanggtgtgtcctaaggaagcaaacaataccctnagctatncaggtggaaaaatcctactagagaaaaagtcacttgattttt

SEQ ID NO: 1838 - DNA, 336 bp, Homo sapiens
  misc_feature (1)...(336): n = A,T,C or G
aaattcaaggtgctctacnntggcnaggtgactgtggctcacaacaacgccccaacgcacnnagggacaantgtctcgaaaanttcaaccatgtgagntgtantcgntcaacngactgggaaancncccaacgggntngcnatntcgcgcctngccccntgcccatgcagcctntccttctcaaagactggactgcgctcgctggccntcatgaaangagtnccaggaagctagnctccgcncttannacctttagntcctttgacantgacattataaaaccncctcctctgtgggcacaatgtggttcancccacnggacatggaaggaaaacc

SEQ ID NO: 1839 - DNA, 530 bp, Homo sapiens
  misc_feature (1)...(530): n = A,T,C or G
gagggcttgcccaagangcttaggaaagcctcttcacttanttattccannccancncaagnangtacgctgncagcaggtgacttcaccccaactgtggttccncacatgcctaggcntgaaaancacnncagccgncnatanctctgcgcccctgctacatcttctggtgatatcatctngggggcccntggctgtgcctntgtccttgggacaaggcccgccacgctgggcttgtantgcacctgggggggtcngctttccctctgctgaaccancccatcctggtgttngctgctacnaaggccactctgttcnngctcngggncgncttaaaacactcctttcctgggnngnccacantaaggctcttaacaccnatngnggggggaaaaggccngggngtncaattccctccttgccttgggccttggnctcctgggggnttntgggctttgntgcaaaagnccccccaagaaaccccctgngcctngnctttctgccatcaangtgctgctccattttctcct

SEQ ID NO: 1840 - DNA, 582 bp, Homo sapiens
  misc_feature (1)...(582): n = A,T,C or G
ccacagcttccttttgtatcaccagagtacaaacangaaaggatggcatntggatcctcaaagccccatagagagatccgaagacacactcacccttcctccgccatctttccggtgcttcagctactgcgcttgcgcagcctcaccgggcggggtagagaggcccgcctcgacgtctcttgtatcatagagacggactctcgctcccgcaggaggactcaggcagcctgagattccttagcgaatgtgagcgtctgggaaaaggtcttgctagccaggattccggcaaaaaaccctccagtttccttcccatcccttctaaggtctctagagtctgacacccgtctggatccaacccttttcagttaggctgtagggtctcgaactcggccgcttgtgaacaatttaaaggctttccacaatgcatctgcagcttccgctacggcacgggctctacagaagttggccgccttgcttaggtgaggtttttattcccggagacttgaaggaccgacgtggcactcacatttggtgggcggttatttgtggaggatttgccggaaataaaaatgtgtcacctac

SEQ ID NO: 1841 - DNA, 356 bp, Homo sapiens
  misc_feature (1)...(356): n = A,T,C or G
atagagacccccagancnacatggatctccagnccttcccnntgtgaacactcntccctgtcnggccacgctcnccangctggatgaagatnagctgtanccccaaaagtgcactgctatnggcgacangcatccattcctcantgaatttggacggggaatcctgtgaaatntgccatcaatccatcctccatganntntntangatgggaaatactgggcctgaanaggacnctntnctgcccannggacacgggatccgtccnttcngttcccngcatgcnccncaacccactcaaatgtgaaggatatgnangagcttggagggacgatgnaagncctgggaccgcatggag

SEQ ID NO: 1842 - DNA, 253 bp, Homo sapiens
  misc_feature (1)...(253): n = A,T,C or G
gcttgctgctccagtccgctgttgcttgcctagctgtgggtgcctccctaacangganaatactcttgtactnctcggaacncntgntgtccatncaaccctgtccntccnacctngcaanancaggtcacaanttgtanccagcaatgnaaggtggctccntcaaccctgganctcttcctacccagcaacancctgcccanctacaaacaactnactgtgccccaaacaggccctgatgagggttcctgaa

SEQ ID NO: 1843 - DNA, 112 bp, Homo sapiens
  misc_feature (1)...(112): n = A,T,C or G
cagaacaacaacaacaacaaagactcccaggttctcattctcattgcttaaaccacccanaagcatctttggcctattattcancagcaagatggcttgaagaaaaaaataa

SEQ ID NO: 1844 - DNA, 383 bp, Homo sapiens
  misc_feature (1)...(383): n = A,T,C or G
aacaactcaccacctggatttccaaggaaagctcaagccaagtgggccagcactccatcganaggcaaagctgcctcttccatgccccaccatgcggaccanaggcaacatgcctggagcctatgttcancaacccttgctcccagtggggagtttctaaaaaggcagccccactcctcanangctggggtcccaaaacccaggcctcttctgtganattcnnantgggaatttctaaanaggcanccatcctcaatgctgggtcccatccagggcctcttctgtganattccntgtncnnnncnctggtgcggcnaanatttttttnaaagnggggggggggggccccccccccccccccccctnngggggggggggggggg

SEQ ID NO: 1845 - DNA, 151 bp, Homo sapiens
  misc_feature (1)...(151): n = A,T,C or G
taagaaaaatgttattacttgaaatngatcngtgaatgcgaaagaangccaggaatattcatgatgacactctctgctngggcttcacttacggtatgtgggcanacacagcaaacaaaccttcttcattttttttttcctcttttgaacc

SEQ ID NO: 1846 - DNA, 207 bp, Homo sapiens
  misc_feature (1)...(207): n = A,T,C or G
ggcccagatgcttctgggctacaccagttcctgtttcgatgtgangttttgaaatgctccgtgaagggctgagggacggcaggaagatggcgggagccaggcagtaccaacttcctggcgaagaagccaagatggagactgagaagtgtttggggaagagccaaaataaagagcaataaaataagccgtccacgggaaaaaaaaaaa

SEQ ID NO: 1847 - DNA, 131 bp, Homo sapiens
  misc_feature (1)...(131): n = A,T,C or G
aagaaggtgatgcccagacagaaaaaanccngccctcngagacaaaagaagtgggaccngaaccnactgaagaaaaagactggacctgatnaagaagacgttggaagaaagatgcttccgatgactttaat

SEQ ID NO: 1848 - DNA, 393 bp, Homo sapiens
  misc_feature (1)...(393): n = A,T,C or G
ctcgctctgctactcgnactgcnagttgaatccggagtctcctgctatgcaaacatctaccctngattgtaanaggaccncaatgcgtttctcaaacccctatgtnaangccnctctccancancgaggggcggcgtctgaagaaacggaagacctccattaagaaaaacacactgaaccccacgtncnacnaggccctggtgttcgacgtggctcccganagcgtggagaacgtgggtctcagcatcgcagtggtaaactatgactgcatcggccacaatgaaatgatcggggtgtgccccgtgggtcccnaangctgccgacccacacggcagganaacactgggcaganatgctggctaacccgcgcaagcctgtggaacactggcacca

SEQ ID NO: 1849 - DNA, 148 bp, Homo sapiens
  misc_feature (1)...(148): n = A,T,C or G
agaatcagcatgtcagctcttaagctactgctccagctccatgcctgccggcctgccaccatgcttcctaccatnatggctatggactcaccccctgaagctgcaaacccccaaataaagctttattttataatttgaaaaaaaaaaa

SEQ ID NO: 1850 - DNA, 101 bp, Homo sapiens
  misc_feature (1)...(101): n = A,T,C or G
aaactgtcatctctcctgggctatgagacggaaatgtanaattctacacatctacggtgtaccaataaaatgcttatgtccatttccaccatccaaaaaag

SEQ ID NO: 1851 - DNA, 385 bp, Homo sapiens
ggacgaggatccagatactcccaagtctgtgaggttccgagtgaaggagactgtatgtggcaaggcagagcggcagctacctgagcaatgtgccttcaaggaacagggggtggtgaagcagtgtatgggggcagtcaccctgaacccggccgctgattcttttgacatcagctgtaacgagcctggtgcacagccctttcggttcaagaaaatttcccggctggctggacttctccgcaaaggtggggagaagattggtgaaaagcttaagaaaattggccagaaaattaagaatttttttcagaaacttgtacctcagccggagcagtaggcctgccttggcctgtttctggattcctaaaataataaacttggtaaaagaaaa

SEQ ID NO: 1852 - DNA, 256 bp, Homo sapiens
  misc_feature (1)...(256): n = A,T,C or G
aaacataaagcctctcnacccaggcctggaatgtttccaccccatgtcnagcantgtggttntgcaagangaaacanaaagcctctccacccangcctggaatgtttccanccnttgtcnagnaaacccacncagcgtcttgtcatgngcgaattggaacacgcntatgcnctccgggcggcncgggtcccacgtccacttcgcatattaaggtgacgcntgtggcctcgaacaccgagcgaccctgcagcgaccc

SEQ ID NO: 1853 - DNA, 326 bp, Homo sapiens
  misc_feature (1)...(326): n = A,T,C or G
gactgcgctggaggtcactcagaagggtgcactgggggaacactcacccaatggtgagtatctggagagcgtataagcgcatgccgctgtggacttttcancgatgtcatgctgacaaactgactnancangagttacccacacangaancggacatncatnttcactgcagacccagaagacgtgacgggagaccaggaaacgtctgcctcgctgacttactatattcccttggatgtactgatcaggctacattccgccaagtcaaaaacgttgagagaaaaaaatgtctaataatttcctctgataatcaccaaaaattacaa

SEQ ID NO: 1854 - DNA, 161 bp, Homo sapiens
  misc_feature (1)...(161): n = A,T,C or G
ctcctcgatgtccctccagtgctacantcnaggacacaaggtcgccatctccancacacttgtccaanggaanttcctgtcgtgcatcancctcntcncntncagtcgctnaaactctcatcnactacannantgancacttctcccctgcgtcccctccc

SEQ ID NO: 1855 - DNA, 147 bp, Homo sapiens
  misc_feature (1)...(147): n = A,T,C or G
tccctgaccccattctcctcacctntanccacnattgcactggatggtcccanttgcaaaaaacncnngttngataanngtaaaatangcctntctatggaccctcggtgtttgnnatgcccaatggggatcttgaaaagcgcccat

SEQ ID NO: 1856 - DNA, 110 bp, Homo sapiens
  misc_feature (1)...(110): n = A,T,C or G
aacctgggtgccgtggtgggcaggctggaggcaaagctggcagaaatccgctcaganacagaacagcagcancaggagcgggcacacctgctggcgtgcaaaaccagcta

SEQ ID NO: 1857 - DNA, 390 bp, Homo sapiens
  misc_feature (1)...(390): n = A,T,C or G
gaatggtgcatttctgatcagctggataccggataaacatgagtggttgtggtccagcccaaagcaaacagactttggcatcgtagttgggctgtgccccagagccacagagatgcacattttctagaaanactttgggagacacaaagctttcttcannactttaagatctggatacaactgagacatctgaaaaagctacatgtactatgggtatatanctgggagctggggaccttgggcctcatctataccatgagaacactcacggggnaaggaaggctgttanttagtatttatgaaggatacccancttttgaggacattgttagggggttnatcttggtttgtttttaaaattaaaaaagtgtacaagtgtttttgcttgcc

SEQ ID NO: 1858 - DNA, 395 bp, Homo sapiens
  misc_feature (1)...(395): n = A,T,C or G
tttgggccagaagctgaagaaatgctccaacttcctgacttactggtgctgtataggtgcatcnatctntccncngcgtgtangtcggtgnganagtgcntgaacgnctgagnntggagtgtngaacagttctgactgctatgtngactgggggaattgnaccgggtcctctgganaagcncccagagatttcgnatgctgaggcatttctccncnccccgttttcacnncttantgacanaaactctctcttgaaaanctctnaggaggantngtgggttnngtatgccacccttantttgtactanttaggattaacttcatctgtgaatttnaacaacccccccccccaccacannnaattgaatttattgtctgtccaataaacataagcc

SEQ ID NO: 1859 - DNA, 392 bp, Homo sapiens
  misc_feature (1)...(392): n = A,T,C or G
acaagatctggaagaatgngnatgatctcaaccaaccaacaacctccttcaccaccanacagcctggacggacagctaccccacatgcnatgtntccngcggtttnttnggaagccantggnatgaaatcnaccctcaanactggaccaaataccaggtntgggaatggctgnaacacctcctggacaccnaccnnctanacgctaagctgcntccctttccaggagttctacattagcggaaaacacctntgcagcatnaatctgcangaattcacnagggcgacaggctcaactgggcanctgctctggtagcaacctanagcatctcangtggaacngncantgcagnaagtgacctttnccagtccgcncacgatgtctttgtccaga

SEQ ID NO: 1860 - DNA, 137 bp, Homo sapiens
  misc_feature (1)...(137): n = A,T,C or G
acttgggatggagagaggtcagcggttaagaaacngactgctcntccaaaggtcntgagttnaactcacancaaccncatggtggctnncaacnatctgtnctgagatctgacncccncttctggtcttcagacaca

SEQ ID NO: 1861 - DNA, 263 bp, Homo sapiens
  misc_feature (1)...(263): n = A,T,C or G
cactgaagccttgagcattgtgacacccaggatcccagagtcactgagacgcttttatgaagattaccaagaaaagagtggactacacacagtctaaaaaatacttatgtgcatatattttctanagaaaagtttgttttcaaatttttgtcttganagtgtttactgtttcttaataggtngatgtttgaaataccttcactggagttgaagagccnnngttttgactcatttggagtatgntaaacatttctctgggccgt

SEQ ID NO: 1862 - DNA, 369 bp, Homo sapiens
  misc_feature (1)...(369): n = A,T,C or G
ggaccacagcgtgcttcagggcttcatccccctccttcanaagttccggctgccagggttcaggagaataactgagatcactgcctgacagcagctgagccagtccccaatgtgaccactgtaaccactgccatgcctgagcccagaanacagaacgacgcgctggaanacaccagaaggccacacaataaanagctctttccttccacgtgatctgantgtcggcaccagtgggcaggctcttgctctgcaaattaacacncagtctccgtgggggaaaanaaaaggggatagcgtcgggtcancacggaggaactggggatccattgctcatnggtcaacatnaatcctgggttctgcaggcttggc

SEQ ID NO: 1863 - DNA, 396 bp, Homo sapiens
  misc_feature (1)...(396): n = A,T,C or G
ggacgatcacggacgtgcagctcgccatcttcgccaacatgctgggcgtgtcgnttntcttgnttgnggncctctatcactacntggnagnaaacaacccnaagaagcnggaatgaaagtggcgctntntccgncccanggttccaggacatagtctgaggcaagatgganggtgngagggccttcacacttnacttcatntctcctacccatcacagcatacaaagcaactacacctggatttttccaaacaacttttatttcctcaaagtcttccttaaccctatggagcaagaagctgccactgaatagggcccagtataggggctgctttcttttctactccctccccccaatacaaaaatatagatatatatatatagatataaaaaaaaa

SEQ ID NO: 1864 - DNA, 163 bp, Homo sapiens
  misc_feature (1)...(163): n = A,T,C or G
catgggtttccttgatcgccgtnatnagagcctggtgcggggacctnaccngatcancnagtgnactnccngtcggggaccatccancttcactaanagtcngggtgcnaaggaanacagggcatctatacttctgatatgaaatntgtgcaaataaaacaaa

SEQ ID NO: 1865 - DNA, 535 bp, Homo sapiens
gcagagaacaaatgccaagaacttttgtgcaggtgtgacgaggagctggcttactgcctggcagggaccgagtaccacctgaaatacctcttcttcccctccattttatgtgagaaggactctcccaagtgcaattgacaggctcacatgtccctttgcacatggaaacgcacttcactttcagtgatcaccaacagcatgcaatttgtgcaggagagtcaccggaggccaagtgctaaagccacctgcgtttgctttctccttccattcaggaactcacaactatgagcctgtggagttgccagtctgatgaaggttcaaagtcctgggcctgttttatacaaataagcgctgtgttgggcgtggtatactttttgaaattcagcctttatgagaagctgtactatcttgtacctgctgcagggctgctggtcagatgtgggtgaacacctgcttaggctttgctgtggtaataacattgccacatgatacatctaagaattgtaactgtaataaaaaaatgttccctaactgg

SEQ ID NO: 1866 - DNA, 638 bp, Homo sapiens
  misc_feature (1)...(638): n = A,T,C or G
gcccgactggcccggcagcacctgctgcccttgctgcgccggctggcccgccgactgagctcccaagacatgagagaggctctgctgagctgtctgctctttgtcctcagccagcaacagccaccggattctggagaggcctccagagtggaccactcccagaggaaggagagattgggcccccagaagtgaggccacgggtcctggaaacagcaacgcccatcaaagtacttttggagccggttagtccaggcgtcggtccgcacgcacgggcatggacggcagactgcccagtgggcgaagacagtccgggctgagtgcaagagggctctgacctgaacagttcccactcccctagctcctagcaggctacagattgtgttgattgacccttcctctctgcagctccctctgccttatctctggcctccagggtggacctgcaaatgcgggtatcaaggtcagttaagagatgatgtttcacttagactcaagacaatttagctaagaagnggtatttaaatccaaactgtcccgnctaccttaaaattataagcccttgcttccgttaaagaatgagtacttttaaaagcttggtacccaacaagtagtcaataaaccaaggacagtgtgttggt

SEQ ID NO: 1867 - DNA, 257 bp, Homo sapiens
  misc_feature (1)...(257): n = A,T,C or G
aggaattgggctctcncacagancaaaacggggtcaaaagngggccacgatgcacgttccgagaacaaccacagaatgttccagccctaagtcagcgccagatgtcctgaccacaccctgatgccaccaagttcctgcttccttgtgtagctgccaaaanaaaaatttccactgccccacccctcctgctgagaagtacttcctcctttgcttgtgcatttaagccttgagccttgctgaatacagtgacaccttga

SEQ ID NO: 1868 - DNA, 252 bp, Homo sapiens
  misc_feature (1)...(252): n = A,T,C or G
ctgggtctgtgaccctcacntgcttctcaagaagaccctggactctccatccgctggctcttcgatcaccanggcctgtacttcnatgantggatnactctgtcccaganatacgtcaaacttaccatcntacccagccnagagggaggatgctggggagtaccaatncgangtctcctncggctacagcttctannatnaatcncccgctccaaatgtcngtcactagtgagtgacctggcctctctcttc

SEQ ID NO: 1869 - DNA, 172 bp, Homo sapiens
  misc_feature (1)...(172): n = A,T,C or G
actcgagaaagcagccnnggctgcatctggcaagtntcncctccntgggaatttgccggcccnaaaaaagtgaaagaaaatgaagtcagataagaatgagaatctganacaagaggcagacnattgagaccacaggttttaccccccgaaacatgaaaagtaatccaaatcc

SEQ ID NO: 1870 - DNA, 176 bp, Homo sapiens
  misc_feature (1)...(176): n = A,T,C or G
aagcggcgactgcttnncnagatgtctgaatggaccaggaaagatgtgatcttcctatacgccaagaaattctaggaacatcagtttcaagtcctcagaagctattctggggaagaccagtggacccaatgcatgtggcaaactccaaaaaaagacgtgaaacaaaataaataaaa

SEQ ID NO: 1871 - DNA, 253 bp, Homo sapiens
  misc_feature (1)...(253): n = A,T,C or G
tattaggctggacccgcaaaaaccttgcagaacacaaggagctgatcaacactggatcncccnancnttcgtttnttggggctaaancctcttctaaacatccanntgcactcctaaaaaanatncccctggtatngnctcgtcttcntcttttctttctgaccccgacggtgttggctgtnttncncgtggatgcnangggtattnggattnncccngcatcctccaacttcgttgggaagggtttaaggca

SEQ ID NO: 1872 - DNA, 319 bp, Homo sapiens
  misc_feature (1)...(319): n = A,T,C or G
ctagcttcattatcatanccccaattctcatagctgngnacatactatnacnnggttnctnctnnaataaacggagntgtnagatnacagctgtgnnntgcactcatgtgtgagtattnnncatgantctgttttatntancancatattatgctgagttgcctgatcctcacactactggtgctgtnctgcagtatatcttcanttgatcgnaggccctgcccacatctggaactaaggccantngagtgcnctccaccttactggtgtcaggactttgttcttctgagattattgaggaccccacacacacacacca

SEQ ID NO: 1873 - DNA, 164 bp, Homo sapiens
ggtcttccctcgctgcttcccgtttaccgtttaagatgtgagctctcagcttctgtgccaagccgctgtgcctgctgcctgctgccatgcttccccaccatggtggatccttacctctctgggactataagccaaataaacccttccttccttaaaaaaaaaaa

SEQ ID NO: 1874 - DNA, 444 bp, Homo sapiens
  misc_feature (1)...(444): n = A,T,C or G
atctccattcacaacctccctcccataacctgggtctgaanaagnncaaacccganaaanaccaactccctgaacncnntccctctctttctccanngangtggctggggcaggangaactgatnaatatttcanccggaaccctccatgtgattttcttttcccnacacttaacaggtttcaacntgantcatctgccccggacctgcaacnatntatcnatggtccgncccnggctgtaggtctgcctcncggaactacaanaggtcatttcctcaatcanctccatggcccganangntcaggaactggaggaccgcnacncagtcntntggggaaaaagggcanaaactgacnanacttnatcaccttcaaatgacaaatttgcgaaatcccaaacttccaacacctgaaactcntngaantatcaaaccttccatctcc

SEQ ID NO: 1875 - DNA, 240 bp, Homo sapiens
  misc_feature (1)...(240): n = A,T,C or G
tgaaggtctatttgtgtatgaatacatgcacatgagtgtccatggaaaacagaagaggacatgagnataccctggaactgggattatgcacagcatggtcatgtgaacagtgctcttcctcactgaatcatctcgatgcccactgatacaagacactaatgagggaaacagtgggacagcatacaagaactctgctttttcttccctcaaaacctaaaactgctctttaaaaaaagaaaa

SEQ ID NO: 1876 - DNA, 421 bp, Homo sapiens
  misc_feature (1)...(421): n = A,T,C or G
agcagtccctggactactcacgttctanacactgcctcagggctccctgcccaaggcctctgcctccggctgtcccgcctggaggccccctgccagcagtggatggagctgaggacaagctacacaaacctggacggtcgctgtcctgggctcctgacaccaagccagataaagccaggcacctataagctgttcttcgacacagagcgctactggaaanancggggtcaaganagcttttacccctatgtagaggtggttttcactattacaaagganacccagaanttccacgtacctctgctgctgagcccatggtcctacaccacctaccgggggaattaaantgatgtgttacctgaaaaaagccatctatctgcctgtttctttcccagacttagccacccacacaaatcatggg

SEQ ID NO: 1877 - DNA, 113 bp, Homo sapiens
  misc_feature (1)...(113): n = A,T,C or G
tttcagaaccatttacaagttctgtaatgtggtananctataggagggtgtggcctgcttctgtcacctctgaggagtaatggactgtgttgtggtatcactgggcccttttc

SEQ ID NO: 1878 - DNA, 394 bp, Homo sapiens
  misc_feature (1)...(394): n = A,T,C or G
ccagcccaaagcaagggaggtccagcannccanagtcctgggcccaggcnctcttgcaatccccaanaanccaaggagcgtnagtccacgtcccctgcagccatgcagcctgtccagctgccccgcctggccttgtctccaccgctccctgcccctccancaccancnncggngctggnacaagtggtaccctcatctcctagcccaactcctcctcggcccacctcagccccagaanactccctggacttcctgcgggctcactggaaactgccaatgcnntcanggaactggttggcacccttcggcagggactggccaaactgaacgaagccctcagtgccctgtnaccccttttgccgggaacccanctgacccgctgcccccgccccca

SEQ ID NO: 1879 - DNA, 281 bp, Homo sapiens
gctggactcttcctgtaccagtgttccaaagcctctggaattcaagacctactcctgaggctacaagtttcttagcccaagcagcacagcttctccaccctagggaaccctccattctccgtggttctgcagcccagtaactctcaggcatgcatagagagctgatggctcagggtccctagcccagcctcccatcagagctgacgggaactgcctggggtagacacaagtcacagtttaaaagtaaataaatcaagtgctttcacttccaaaaaaaaaaa

SEQ ID NO: 1880 - DNA, 313 bp, Homo sapiens
  misc_feature (1)...(313): n = A,T,C or G
ggcagaggagacggacaacntattcntggcttgcaaagcancagggtggtcgggaactgantgagagagatgccanctacaaagagtgctcctncaaaaatttcaancatgtgttnngcncncngtccagggtggnccnggtcgcatcacatgtataactcaccnnccgcaaatagntcncnttcttnnaaannctcnaaattaccctcanctctcatgactgtggcagcctgacctatcgggatgtnaatttggaccaatncntgataaaactgcngcttctctgtgatctgcgcctgccttgtctgcacgt

SEQ ID NO: 1881 - DNA, 254 bp, Homo sapiens
  misc_feature (1)...(254): n = A,T,C or G
gctcagggtggatcttcatantacattcntgntgactcccncactgctgnangntnaaggatcccctcacantccacctntctacnagaatcacagattattcagcggagaatctgggtcccctcncccttcattcataactggtgtcactcccatantctttcacccttganctaaaaaaatgtggtgacacacntctaggaatcccctcacttganaagacanagtccagtgggatctttgtaaattctaga

SEQ ID NO: 1882 - DNA, 345 bp, Homo sapiens
  misc_feature (1)...(345): n = A,T,C or G
gtatccgggttctggggtgtggactctggnggntgctncactcgtcncattnntcatgatgattgggaataaggtgcngtatattntccctcagctcctttctnatctccttgatgttcntagangtcctacgtgtatgggtgntacctacnatncggctccnngaaagncttcanaggaatntcctggtcanctnctctaatnntcctcaaaacgtcctntangccctcngatatntntggangatcttatggctacccaanaaacncttnnaaaaccttgtnatctcctctccagggatgggtctgtgatcttcaccattgagtatttgctgaatgacctcca

SEQ ID NO: 1883 - DNA, 149 bp, Homo sapiens
  misc_feature (1)...(149): n = A,T,C or G
actggtcacatagtacttctagacncggtcnaaaatntatngctcnaatgtccttccgcnncanatanncgtancttngatagtttcctggtgtgtatgccttttttagggtttttcaattaaaagaacacancaagaatgtcaacgga

SEQ ID NO: 1884 - DNA, 194 bp, Homo sapiens
  misc_feature (1)...(194): n = A,T,C or G
tgtggatccagggatcnaatcatcattacgtggggnatgganggatatcggancnantacnaggccctggctttggccatcaaggcaagccacannacgggcatccagacatgttggttacgaangctgttgtctataaaganccggacccnnccccggaagagagagacnnggaaaggggcggaatccttgac

SEQ ID NO: 1885 - DNA, 389 bp, Homo sapiens
tgtggccgcgaaagtgacaagctgctttccagactccacgggcccggctgcttttatggccctgcttcacagggagaagagtggagcacaggcgaacctcctcagtctgggaggtcactgccccaggacctggaccttttagagagctctctcgccatcttttatctcccagagctgccatctaacaattgtcaaggaacctcatgtctcacctcaggggccagggtactctctcacttaaccaccctggtcaagtgagcatcttctggctggctgtctcccctcactatgaaaaccccaaacttctaccaataacgggatttgggttctgttatgataactgtgacacacacacacactcacactctgataaaagagatggaagacac

SEQ ID NO: 1886 - DNA, 341 bp, Homo sapiens
  misc_feature (1)...(341): n = A,T,C or G
atccatgagcagagctcacagacaatggccaagtgtgtcaaagntgtcancgagggcgctcaggcagtaaaggagccgtccatatgctgagacatctaacaggggaccctttttgctacagacagtaaatggacattgctgtaatcccttataagttaatgttttccaacatgagtctgaatgatgtaatatttaaagttatactatgcttatccgaaaatggtattgtacttatcaaaaatcctggcagtttaaaatgtatgtaattgtgtgcaagcattaactagtttaataaaactatcattttctctttcatgttgaaaacactggaaaaaaaaaaa

SEQ ID NO: 1887 - DNA, 472 bp, Homo sapiens
ggatggagacctctcctttcctctggagtcagtgaaaaaacttaagggtctccgcgaggtacaggagcccagactggtgagtcacaagaagtttgctccccggcttcttcagcccgtggcaccacagctatgtagtagccactctgcacttccagaagcactgaggccggtctgcgagaaacccaacgccgaggagatcctgcagaggctagaggccattgctcaggacccaaacacatgtgagatctgtgcctacgctgcctgtacgggatgctagagtgacatcgcttgcctttctctcagcccatgtggaagcccctctatcttctagaagtcacgaggctaacaaactcataccctcagcatctattgccctgccacagcggggaggaggctgaggagacagctacctggagaagccttgcctgagggctatgttaaccctcagccaataaaccaaacttcagaactc

SEQ ID NO: 1888 - DNA, 375 bp, Homo sapiens
ggatagactccggccggatgccactcccagccctgaccaagaaattgcttcctgttgccagtctggcctgctctcctgcctccaacaaccaagctgccgatagcctctccttttgctcctggaccctccatcttctcttccctctcatcctttgaccaaccctccaactctgcttctcaccatcagctaaagggaccagtccctaggggagccaagagctcccaaggaaggatgaaggagagaaggcaagcatcccaaccagatccaaggggacactgtccccatgctgaatgctcaggactcttgggtcctgccctgtttacggatccctcattttgtgtaataaagtgcattgagtgcccctaaaaaaaaaaa

SEQ ID NO: 1889 - DNA, 405 bp, Homo sapiens
  misc_feature (1)...(405): n = A,T,C or G
ggagccccgcagtctgagcgcagcatccgcgcccttggttgagacgagcactcccctccgcttgcgtcgggccgtgccccgaggagaggcggcgggtgcggtgcaggagctggcgcgggcgctggcgcacctgctggaggccgagagacaggaacgcgcgcgtgctgaggcgcaggaggctgaggatcagcaggcgcgtgtcctggcgcagctgctgcgcgcctggggctctccgcgtgcctcggacccgcccttggcccccgacgatgacccggacgctccagctgcacagctcgcccgtgctctgctccgagctcgcctagacccggccgcctggcaagcccaacttgtccccgcccctgccgntgcgccgcgaccccggccccaatgtattatgatggcccc

SEQ ID NO: 1890 - DNA, 333 bp, Homo sapiens
  misc_feature (1)...(333): n = A,T,C or G
gcctgaagccctagcttgntcgnagntggaccttcctgctcaancgctcctgctncagccaacatgggggaacccgaaggagncactcacgtgcatctttctaatgaacaaggtgatggatcancaggaagacgagtcaccaccgtcntccttacgaagatgatgtcacatcaaaatnaatatgatcctgnncctaaaggcaancgggtactgaggatgatgaagatgacatgtngacaccaagaagcnaaaaacgagaggatnatnacntccccncgaannntnccttacgcccgtgactattcccctccacttcccgtctcagaatttaac

SEQ ID NO: 1891 - DNA, 399 bp, Homo sapiens
  misc_feature (1)...(399): n = A,T,C or G
gttaataattgttgtctgcangcacacnngacatgcctccacccccatcntancanacagantnnttnnctttccantngcctgtctcctcnactgnncttgtcnatgttacattatcatctncgcactctggntncaaattngtctcncnngttcctgaagttggccaatganattcctctgaaccttgaatgtggatgacttcaggcagccncngttncccaaanaaatggtaacctananacaccttcctaaaagggctcccacgaaaggggaaagccaggaaagggcaagangacggaccctgaccactatgaaacagactacacgacaggtggggaatcctgcgaagactggaagaagactgggtccngggaatatcccctatcacttccgatc

SEQ ID NO: 1892 - DNA, 420 bp, Homo sapiens
  misc_feature (1)...(420): n = A,T,C or G
agctacgatcgacacactctttacaacaatncanggtataaggnccttattcttctgcttgtgtccctcctnggnatggccnatgcnactcccggagcccggggtntnattaactgctcnggaggaagttntatctgttnnannactnntctctgtntgagcagaggctgacctnttganggggacctgaggcattgcccgttgcaccacaaggccatggagaacnctgactgctacncaagcacctctatnggatntatnaccggtgtccctgtgtagcggggcctgatctgtgacggggantcgaacntcaacngcgccatctctnggncnnnntatggcatctgcctcnactccaggcgctccaaacagtganatcacccccttttnctgtannccttcttctctttctccctctgt

SEQ ID NO: 1893 - DNA, 483 bp, Homo sapiens
  misc_feature (1)...(483): n = A,T,C or G
gacaatgggagcagccaaagctagcctcggccggatcttcccagagtcctccatcttgttcctatgtgacatgcaggagaaacttcgagatagaatcctctacttcccacagatcgtgtcaatggccgctcggatgcttaaggtagcccagatgctagaaatccccgtcttgctgacagagcattacccacaaggtctgggccccacagttcccgagctgggtgctcagggtctgcgaaccatgagcaaaacgtccttcagcatggtgcccccgcttcaacaggagttggacaaactgccccagctgcagtccgtgctactctgtggcattgagacccaaggctgcatcttgcacacagctctggacctcctggaccgtgggctacaggttcatgtaacagtggatgcctgntcttctcaaagtgagatgaaccggcttgtggcactggcccgaatgcancaaaatggcgtctttctgtccac

SEQ ID NO: 1894 - DNA, 197 bp, Homo sapiens
gcacagcccctgcctgcctcctgacaaccccttggactttgagaaaaccgacatgattgaccgtcccacttgatgtcctcgcctagaagagtgacaagagttttggagtcttgagggccctgctgtgtgtctggcgctcctggacatcaggacactaaataaataaagactgagtactgggctctgaaaaaaaaaaa

SEQ ID NO: 1895 - DNA, 200 bp, Homo sapiens
gttatcgctcagtggccgagcacttgtctaatatgtgcacagccttgggctccatccctaatactgcaacaggagcaggggaatgctgctggtgtcttggtatctggggcaaaggtggggggttaatgaaaagcaactcagactactgaaccagatacagaaaggcaaataaaaatcaatgtgttaccataaaaaaaaaa

SEQ ID NO: 1896 - DNA, 145 bp, Homo sapiens
agaatgacttttgccccgaaatctggatgacctccagcttcacccgagccaggagaaagtctttgtgaactgtgaagtgaagtcaaaaagactgactgaatcgaaagagcagatgagtcaagagacccatgcaaaaaaataaaga

SEQ ID NO: 1897 - DNA, 437 bp, Homo sapiens
  misc_feature (1)...(437): n = A,T,C or G
acttctgcattccgcnncttctctggataccccgccttcaggaagacttccaggactgacggtacccagtctcggcgccctcctcccaggagcccttanaatggcnagggtctgggtcctgggaacttgcnccnctctgcattgcttcccatacactgtatttgccttngctgatncaaaggcccgagatgctctcagattanccganaccgcagcaaacattgccagtgtgaccgananaagaatttcttcttaaagatanactcctcattctgacacgtcacggagtccctgtcatcacaagtcanagtgtanctggagtccccatcgtcccttctatgtccancagatccaggacgcctctttgaggcagatcattgctgtaggaaagccccatttncctttccccactatccttgtcctcctcctgtgagtga

SEQ ID NO: 1898 - DNA, 195 bp, Homo sapiens
  misc_feature (1)...(195): n = A,T,C or G
ctctcatcttcggaaggctggcactcatatcganaatatcgatgaaggacttcanggatgggctcaaactnttgcttctgttggaggtcatttcacgggaacgtntgcctaacccagagcgggggatnatgcncagtgcactagatccnccttaactctcanaatggaccccaaactcccccaaaaatccttttt

SEQ ID NO: 1899 - DNA, 175 bp, Homo sapiens
  misc_feature (1)...(175): n = A,T,C or G
gcacctgcacttttcccacctcagtgcactacaagggtgcaattccctcacaggccagaaagagggcctggancccctgggaaacggtnaacccatcctgtaggtnngaanaattnaactgagtcttctggaataacaancantgctcttaactnctgacccatgtctctctcca

SEQ ID NO: 1900 - DNA, 179 bp, Homo sapiens
  misc_feature (1)...(179): n = A,T,C or G
ccagaccagcttgctcaacgacagatactattttggaaaattgcangcatccctctcacagccggggttctggggaagggaagaagcaaagaaactggttctctcccctgggctttatgtttggcaaacttgtttacttaaaatccacctggcccccaaatttccattaaaattgaagc

SEQ ID NO: 1901 - DNA, 220 bp, Homo sapiens
ggtctgcaagatgacagagcctgactcccaagttccgtcctcctcacccctccgctccctcttcaagccaaaaggagccggctgtctggggtctggttggccctgattcacaatcccacctggatctcccaaatttgtgaggaaggttgctaaaaagctaagcgctgctgccgcacccactcagctccctcactgctgctgaccattcacaaaaaaaaaa

SEQ ID NO: 1902 - DNA, 107 bp, Homo sapiens
  misc_feature (1)...(107): n = A,T,C or G
aatctccgaaattcganatcaagctganccgggaaccttaatataacttcgtataatgtatgctatacgaagttattaggtccctcgacctgcagcccaaaaaagta

SEQ ID NO: 1903 - DNA, 255 bp, Homo sapiens
  misc_feature (1)...(255): n = A,T,C or G
ctggtgggaattgcccccaagatactgaacctcaaggtgcaaatgcctttccanccacttcctgatgcatactcgggccccctgccnactgcagnctttcgggctgtgtganctcctgaactgtctccgannctcctgagggagcctgggcccgatgtcctcccatggatccctgcttttgtggcctgcttcattttcccttcttaatgtacatggttgttttccatctccacataaatttggccccaaaaaaaa

SEQ ID NO: 1904 - DNA, 196 bp, Homo sapiens
gggtgatacaattctggagactggagaagtaattccccaatgagagattttcctgatcaacatcattgaagagtccttaaaaacttaacagacttgtgtaacagcacaagtatgttcctaaagtgctgtatttactgaatctgtttcctggaaaagtaattaataaagcttattctcagagtgttaaaaaaaaaaa

SEQ ID NO: 1905 - DNA, 186 bp, Homo sapiens
  misc_feature (1)...(186): n = A,T,C or G
agaacaatttatctctnggatacggangaacatcactaggcacattttatgaatactccaantcctaagttacactganatctagaccttcatttggcagggtcaggccattggatggtgttgctgtattgtcttgtcatgtttttaaaatctgtgcactttgtccaaagttgacatttttttttt

SEQ ID NO: 1906 - DNA, 309 bp, Homo sapiens
  misc_feature (1)...(309): n = A,T,C or G
gccccacctccctccctcgaatcancntcgatgaaantcanaaaatgtagagtctcanaatatctgttcaanggtctgacngtcgcangatcctcncnaagggatagtctgccgtccccatngtttctgatcccncgggtcaccactgccnccancaacctgcnnaangctgctgaancccatccncangaccaccatnttgaagaggaatgttttcntnactgtattgccncgtttgaggaagaccaccccngggcgcacntggcanggagcantgccaacgatnattctcgtcctcaactggatgaa

SEQ ID NO: 1907 - DNA, 218 bp, Homo sapiens
  misc_feature (1)...(218): n = A,T,C or G
ttccaatgactgccctttnacaataaaatnggaagccacaaccanngtcttttggataaagcancacaatngacattgtaatcgaaggcaacnatacgcntatccttccntaggcacttatctttcccaancatgggaaagatcnnccctcccccactcatccctcccncnctcncactgnctggtnggctntcagaactatgtaaaataaaatataa

SEQ ID NO: 1908 - DNA, 531 bp, Homo sapiens
  misc_feature (1)...(531): n = A,T,C or G
attccactccgttaggattaaagagacagagtgtacttcccccaggagagacagcctaaagactgcgacttcctggaggatggggaggagagaaattgcacagggaaattcttcanaaggcggcagtcaacctncctgaccttgacctgcgacagggattgcagtcgagaggatacccaagaaaccagttttaatgataagcaagacgtctctgaaaaggaaaagttcgaagatgtgccccctcacatcaggaacatttatgaagatgccaagtatgatatcatcggcaacatcctgaaaaatttctagggctggaaagaggagggaggtgctccctgcatactatgacctcctctttacctncactacccatctncccctnctgnattcangatctgcccctccttnctgcccttcccaggaacaccccctctagagtactctagctcctaancatncatacctttgtncatttgcttcttctgctgggccttctgccttaccctntatctgaaacccttattgattctt

SEQ ID NO: 1909 - DNA, 233 bp, Homo sapiens
ggaagtacatttgaagaacacaagtagaggaagtgcaggaaacaagacctacagaatgtaggaggagcctcccacggagcagaaaatgccacatcaccgcaggatcctttgctgcttgagcaacctgcaaaacatcgaaacacctaccaaataacaataataagtccaataacattacaaagatgggcatttcccccaatgaaatatacaagtaaacattccaaaaaaaaaaa

SEQ ID NO: 1910 - DNA, 554 bp, Homo sapiens
  misc_feature (1)...(554): n = A,T,C or G
tgacgtgaaacgcgcncctacnagggagaatcaccacactgaaacccagagagacaaaagaagatgacactgctggaaccaggatgcagggccactcctgatctggatgctggggttaagcaagtgcaaggcaaaggcagagcaaaggctctgaggcgcctcttcccgccatgccgccaacccctggagaaacacctgctatttcaactccccaagatcctttaggaaaaatcattgctctaggcctctttgatttttctctcaaaagcaatagctgtctgcctcactgtgcctttgttgctgtggaagactgaagatataaatgagcattactgggatgggacgtctgcgtgaagactcactggagattcctttcaaatgccatctttctgtacactagatttctttctttggatccttaaagatttctttccagtgtaaaggttttatttgttttgttttaatgtctatatttgtttgaaaaaaatcactgtgattttacatttcaccacaattaataaacattgggagcttcattctggtaaaaaaaaaaa

SEQ ID NO: 1911 - DNA, 322 bp, Homo sapiens
ccaaaaatggatttgcctgtcccaccaggcagagacaggagtctggagtcagttcaaggcgagccccaggagtccatcagcatgcctcagacactgaccagcaccctggagcacatcgtgggccagctggacatcctcacgcagacagtgtccattctggaacagcgactgacactaacagaagacaggctgaagcagtgcctggagaaccagcagttaatcatgcagagaacgccaccgtgatgaggggagcaaggatcaggagctcagtgattggggggacagcaggccagggatttgtatggggacttgagtaaatccg

SEQ ID NO: 1912 - DNA, 168 bp, Homo sapiens
ttcaactccaccacctcctcagaacttcccttggggaagatctgcatgggccgcccctatacctccaagtgtgtagagacgagtcacctgacgagaggccccaaggtggtcaaaaagcccaacctgtcacgcacagccctcactgcctgatctgcacagaccaaccat

SEQ ID NO: 1913 - DNA, 275 bp, Homo sapiens
  misc_feature (1)...(275): n = A,T,C or G
acatgcggattcccccctgtangatggaggaaagggctctgctaccctgactcacccagagccggccgccttatggggactgcagcaagatggatggaaaatatgtgcaggatctgttgttacaatagacagaaaactgaactgtagtctatgtgtagcttccgaccaaaggaacttcttgagttaatattaacttaagggactcccttgggcaaagttactgatagtggccaaaggccctncggtctgaccanctcccaaaaaccaaacctgct

SEQ ID NO: 1914 - DNA, 232 bp, Homo sapiens
  misc_feature (1)...(232): n = A,T,C or G
ctcctttgctttcctaaccatcggaatgggaaacatcctngataggttccggatcnagttcctgtggcaaggctgantgggacggatggacccacctncggcttgcacngtgcccctggccaccccgcctaggtatctgtttggactacgaaacgggggngcgggtctccttcctggaatgcnntgtcctnccgtgggctgctcaantgccccctggaactgctcagggcct

SEQ ID NO: 1915 - DNA, 319 bp, Homo sapiens
  misc_feature (1)...(319): n = A,T,C or G
tcttctgcttgagtccctcctgggcatggcccgtngcnctcccggacccnggntannatngagtgctcncaagacagctntatcggatctactacnggtgtccctgtgagcggngnctgacctgtganggggacangaggcatcttcngctccatcaccaacgcnattangnactctgactcgactccaggcactcctatcggatanatctacncngtttcctgggtaatgnggttcttctctttctccctcagtncnatctgaaccngccatctgttggcnnttntatcccacttgcctcctttccaggggctccaaa

SEQ ID NO: 1916 - DNA, 387 bp, Homo sapiens
  misc_feature (1)...(387): n = A,T,C or G
taatatctatgctatgatggccttttggaacccaagagtnggattacnacacccaganctgggggaatactcatgagtgctctgctggccctagctcttaccacgtgcagctttcttctcctttccattccctattcctccatttcctcttcccagcccttccctcagncaagcctctgggtccttgggctctccatttcttcattagtctcctcctatcccttgtctctgccctgcatccngcccttccctcantgatggttggaggaatgtactanacccgagaatccccggcctggcctgagagattanatctgtctgtgtgctgccttggtcctcaaantaagcagctaanccccatttggttctcaataaagtgtgaatcac

SEQ ID NO: 1917 - DNA, 406 bp, Homo sapiens
  misc_feature (1)...(406): n = A,T,C or G
atggaagacacttganaccctcgtccnccggaggtggcnccanaggaatctacgcancangcgtngattgaggagcccttgnatcctgtganttntccgantgncctttnacagacgctgcctntaaanagnctagtncttgtgncttaggnctttcccctgtcctanaanngcactgntctttgnagaagtnattcctcccnctacctcccatgngccacacttttaatnaactatnattctcctcttagaggnnagntagaaanccacggcccaanattcctgtcactctcattatccctctagatcagnagtacattntgagacctgtntcacaagtggtcatttctcttctctcctgtctggcatccgatcctaagtaaacaagtgactaatataatcatga

SEQ ID NO: 1918 - DNA, 540 bp, Homo sapiens
gtgaatgagctggatggcattcctctgatcctggacagcagcaacatcgatgacaacaacccctttatgatgcagtgggtggtgtatgctgtgcgaaatctcactgaagacaacagccaaaaccaagatgtcattgccaagatggaggagcagggcttggcagacgcatccctactgaagaaaatgggctttgaaattgaaaagagtggggataaactgattctgaagtctaataatgacatccccccgccttgaatgccatcttcatatgaacacattcagattccatctcacggacctctcatctctgcagtgtatgaaatcacaagtattggacatgtagggtacagatgagggagcctcctaatcctttagagtaaatgagtgtaagctacaagtggacgttttctttatttctttgcagtaagtgttactgtctgcctcacctttgtccctctgggtagaactcgctttcccgtcatatacattgtgcttactgttgtagtaataaacgtctctgtgggcacagccctcactcgg

SEQ ID NO: 1919 - DNA, 400 bp, Homo sapiens
  misc_feature (1)...(400): n = A,T,C or G
tcaaggattctccgccggccanagcccaacaggacacccggactctcgcaaaacacntntctacaccgatcggtccaaaaacaaggtctcaaaaaagctgaaggctcccggtccccaanctcctccacactctccaaaccancantcgggagggcttgcctgcctggtctgtggctctcccttgtccccaatttcggccacccccgccatctcctgctctcttttcccgccacccggagccatcccgtccctcggggctggtacctnactnanaaaacncgggcntgacacaatgccccgcaggtcaatntnaactggggaggaaagcccgctcttcaggacaaaactcccgaacttnaaagcctgcncttcatacagctcggtgaccaaaggggcccag

SEQ ID NO: 1920 - DNA, 212 bp, Homo sapiens
  misc_feature (1)...(212): n = A,T,C or G
gatctggaagacgccccactgaaattcnttncggcaaaaggagggtacgggaaggattnaancgtcaagggtcccaaatcccggagagagagaganatcgggcntctagantcngggtgtccaggacantnactgcgcatctgcacaaactctttctaattatctaacaatnttactctttcagacacttctttctatctttcttttggggg

SEQ ID NO: 1921 - DNA, 261 bp, Homo sapiens
  misc_feature (1)...(261): n = A,T,C or G
ttcctgggagggcagtgaaggggatggaaacactgactgaaactgtaaatcctgccactgctgtgtgtgctnaggctggaatctctgcacctgcctntcactcaggacggggggganccaaaaattcgggggctggcttntgnatttaccctggcttcataacctcaggatattaaattctcatcccaggaatcagctgccaactttagcccatncntcttttntatacaccttancatnaaagggcactttttaaaaaaa

SEQ ID NO: 1922 - DNA, 181 bp, Homo sapiens
  misc_feature (1)...(181): n = A,T,C or G
ctatgtaaatctgatcngaagcccttantatagtntcttggattgtgcacanaatagaaaaatgtntggaaggcaannnnacncttangcttcccaaggcacnnatctttcccagcatgggaaaaatcctccctccccctccctccctccctccntcactctttctattatgctctcttat

SEQ ID NO: 1923 - DNA, 418 bp, Homo sapiens
  misc_feature (1)...(418): n = A,T,C or G
ggaaaaccctccagagcatcctcagggaaaggatgccaccctccagaagtgatgaagacaattcaaggctagggcccaaaccaacttccacaatgtctcagactctctcgggagggtcccgggctgtcagcaattctgtaaaaggtcagcgtaaatcacttgggaggcatttgtgtaggcatggtctctcataaatgagcgtctgccaaacccatatatttctaaaaacatctgcactgncttnaccntgggttcaaancagncaanntncngggncnttcccntgaacntnaaagggccgccaacctngttttggntatggnancntccaanctnaggngaacntcatgngagatatctntactcacatntcacatntccaaacttcccagcanaggcaanaaatctggggaaactt

SEQ ID NO: 1924 - DNA, 214 bp, Homo sapiens
  misc_feature (1)...(214): n = A,T,C or G
acatgcatcgccagtgggcaaacctgatggaaaaaatacaggcctctgtggctaccaaccccatcatcaccccantggcccaggaaaatcaatgantatccttctcctgtcctgcaacaacatccatatccagccaggtggccctgtcccaagcacctctctggccctctggtggcccttgcttaataaaaattctccgagcacaaaaaaaaaa

SEQ ID NO: 1925 - DNA, 445 bp, Homo sapiens
  misc_feature (1)...(445): n = A,T,C or G
gactctagacgtcctctccagaactcttctcaagttatgtccagatcccaggcccctctggctccaattcacactcctgagctctaaggatcacagagctgtcgtctctgtagccagatggcactcctccatgttccccggatggccacttatactctcacccctcctcttagccctccagaaagatgtgtggcaaggtgggggatggacatgacgtgaagaaactcaccttcaggagccttccttacagcaggagggtccagaggcacctggcctgactccatcctttatgggttgcaggacattgccaggtttacacggcctctgagcctggactgtgaggctaggaactcacgtcacaaggnttggtgttaaggatccagtgagctgattgggtagagcacctatgacaggacatggcgtcctgcaagcacgcaataaaacg

SEQ ID NO: 1926 - DNA, 339 bp, Homo sapiens
  misc_feature (1)...(339): n = A,T,C or G
catcttggtgtgtttctgtcttccttggaccacttacagcttggcaagtgtcctcatcatcggtactgctgactctgtcctcctgaanaatatcttgcaggtgaanaaattcggcagcgctagaaaaaaatgtcataataataaatacactggaaantcatttatctcaatnacagactacntgcaattcaaaaaccgacatactaatctgttgcttaaantaaaatcaggggccaaataaatgattgaataactataatttacttcaaaaaaatgccttgaacaaaatctaaaanctgaaccntgtcncctaaantaaccttttcattgtataaatta

SEQ ID NO: 1927 - DNA, 264 bp, Homo sapiens
ggtggttttcacagccaacgactctggccatcgccactacaccatcgcagccctgctcagcccatactcctacagcaccacggctgtcgtcagcaacccccagaattgagagactcagcccaggaggaccaggatcttgccaaagcagtagcatcccatttgtaccaaaacagtgttcttgctctataaaccgtgttagcagctcaggaagatgccgtgaagcattcttattaaaccacctgctatttcattcaaaaaaaaaaa

SEQ ID NO: 1928 - DNA, 292 bp, Homo sapiens
  misc_feature (1)...(292): n = A,T,C or G
tccaaccccgcggacgcacccgcnaaactgancagaaataggnnaaaccnacgggcagngcnaatccaggcctggcgctgcgggcgggaagacgctggcctcagcgagcgcggctcatcttccagattagaagattccccccgcacacaccaggggacccccgcaacaccaaggcacagacagcctccggacagagctgccgcccactgggctctgtccgcccatccgagccaacactggctcccgaatacatcataatttggaataaaatgtgaaatcccaaaaaaaaaaa

SEQ ID NO: 1929 - DNA, 218 bp, Homo sapiens
  misc_feature (1)...(218): n = A,T,C or G
gtggggtctttcaaagaccttggcgagaaagccagacctgcgctggaggacctgcgccatagtctgatgcccatgctggagacgcttaagcaccaaagtccanagtgtgatcgacaaggccagcgagactctgactgcccagtgaggtgcccgcttccactccccacccccgcattggctttcttacaataaacctttccaaaatggaaaaaaaaaaa

SEQ ID NO: 1930 - DNA, 273 bp, Homo sapiens
ggaggaagcaagggcagtcggcagagccgacccaccatcgattcggacacaatcacctgctggaatttgcagagccggtttaaatatgatcataacgtccagaagtctgtttctaaaatatagaaaggcaagatgacagctctaaggatgccaattttgaagaacttggaatcttttcgttttgcattaaaccttgggctcatctagctgggtttcctggtgtgacaggagaaagaaacagtaataaaaaatggcttccttgaaaaaaaaaaa

SEQ ID NO: 1931 - DNA, 210 bp, Homo sapiens
gggccaacagagccaggattcagcaggagcgccagcagaggcagcagcctcgggcagaaccctccctgcctccagaaagctccaggatcatgccccaggacacaagcccctgagaggcttaactaaatgggaccttcattggtcctctccctgctgcctgtccagaactacacgtgcaataaactcattttcagacgccaaaaaaaaaaa

SEQ ID NO: 1932 - DNA, 447 bp, Homo sapiens
  misc_feature (1)...(447): n = A,T,C or G
cttgaggttggcccgcagatccatggacaccttgtgcttagagcccagtagggctcggagcatggcatcggctgagacacggacccggcgcaggggaggacgcttgaacttcccacggaggtccagcaccttcagcttcaggtccttgatctgggggagcaaaggagccaggctctgagccagggatgttagacctagagctctcaccctgaggatccaaccactgggcttccagctagaaccatcctacaagtcctccgggctccaggctagaccatctggggtgctcagaatctcctacccttttccaagcaatcactacacacgctaaatgttctaaatgaacttttacagattacgcccactagttaaccttgcctcttncccataacccagtncccaattaantgataagccaataaacctttactcccatttggaaaaaaa

SEQ ID NO: 1933 - DNA, 104 bp, Homo sapiens
  misc_feature (1)...(104): n = A,T,C or G
aatattccggaaactaanccctatcctgctnaccatctcctgcttctggttccaggctccngaaanncanttgggaaaantgggcctcccccctcctttataaa

SEQ ID NO: 1934 - DNA, 234 bp, Homo sapiens
tgcccaggctcccctaagtttccaagctggcctccaccttgcaacgctgctgcttcagcccgagtacctggattatagtccttcagtgtcccgcccagctcacaaccttctagggtttgttctgtttttaaggaagtcagcatttggaaaatctacacctgtacaagatgtggaaaatcacttgatcaaagtaaaacaaggcagaataaaagttggatatgggaaaaaaaaaaa

SEQ ID NO: 1935 - DNA, 307 bp, Homo sapiens
agtactgctaccccgcctggcccaaggtgaagatttaactattagaggattcaaccatgaaggtctgggtatacagtgcatccctgtgaccccagcactctgtgcagaagcaagaagatagcagcaaattcaaggcctgcctaatgacctacctacaaagtcatacttaaactgagacactgacgctcagtagaagctgagcagaaggatagagacctgcaggccagcatgttctgtctagcaagtttaaggatagggttacataagggaacccccgtctcaataatataaagtaaaataaaataaa

SEQ ID NO: 1936 - DNA, 324 bp, Homo sapiens
  misc_feature (1)...(324): n = A,T,C or G
tgccaggaatccttaccgcctatgtgcatccttcctaaggacataggcggatgccgagctgtgtttgtgaaatggtactataactccaaaactggcaantgtgantggttccgctatggaggctgcaaaggcaacaaaaacaacttcccgagcaaaattcagtgccaggcantctgcatcaacacctgacttgtcaagccaanccagccctccatggantcaanctccctggggacccctgaagggttttgtttgtgaataataataattgcatttccctaaatacatttccctaaaattctgtctatctccgaaaaaaaaaaa

SEQ ID NO: 1937 - DNA, 183 bp, Homo sapiens
  misc_feature (1)...(183): n = A,T,C or G
gttcagatgatgcaaaggaacggaaatccttcaaacacncaaanacacagtacggnaaacacagcacagaatgagagcaggttcaggccgaacctcaacccaacctggagggacatctatcctgcttgggccaccccggtccttgcacacaactttgacaaactccatggaattaaaaaaaaa

SEQ ID NO: 1938 - DNA, 132 bp, Homo sapiens
  misc_feature (1)...(132): n = A,T,C or G
ggggtgagaaagatccagaggnaatggccangnctccctcaagagaagatgnctacattataaactcccttttcaaccccaacacccactatatatttttaatatatagaaaaaaaagctaaaaaataaaaa

SEQ ID NO: 1939 - DNA, 214 bp, Homo sapiens
  misc_feature (1)...(214): n = A,T,C or G
ttccaaactgccttttgagaataaaatgggaggccagaaccaaagtcttttgaataaagcaccacaactctaacntgtanggangaanacnaaaccaaaaggaaaaaatctttcgcancatgggaaaaacctccctccgggccctcccttactccctccctcccttttgacccattttcactcttccaccatacactcaataaaataaaataaa

SEQ ID NO: 1940 - DNA, 111 bp, Homo sapiens
  misc_feature (1)...(111): n = A,T,C or G
atgccactctcttaggtttaaaaatcnctggaataccaaaaancaacncttcctctggtgggcaactaattcttatctttacatggnacagggcgggggggcagggggggg

SEQ ID NO: 1941 - DNA, 119 bp, Homo sapiens
  misc_feature (1)...(119): n = A,T,C or G
atgccactctcttaggtttaaaaatcgctggaataccaaaaagcaacncttcctctggtgggcaactaattcttatctntacatggnacagggcgggggggcagggggggggaatttga

SEQ ID NO: 1942 - DNA, 161 bp, Homo sapiens
aagctggatgtcagatccctgggaggatatgagaggatgtttccagaaagaccgaactaaaaaggaacgtccaaccctgaatgtggaggacatcctcctctgggctgggctcccagactgagtaagaagaaaataagttgagctcgccccccccccccccc

SEQ ID NO: 1943 - DNA, 226 bp, Homo sapiens
  misc_feature (1)...(226): n = A,T,C or G
agggtacagtggcgactggaaaaacacttcactgtggcccaaagtgaggcttttgacagtgtttaccgaaagcaaatgcacggggtgcaaaggttcccctgggacacntctgaaaaggatancagccctgatggccagcctgaccctgagcccagccccagcccagcttctgatgaccccaacccaggatcctcacaataaacttatcactccaaccaaaaaaaaa

SEQ ID NO: 1944 - DNA, 390 bp, Homo sapiens
ctgtgttcctggtgcctgtggaggccagaagagaatgtcacgatcttctaaggctggggatgcagactcttgtgagctgccatgtgagtgtgggacttgaacagcagccaaatacttttaacccctgagccatcacttcagcatctcccccacaccttctttaaaacagtctcttgtaaccataactgaaaactatcttgaagcctgaatactcccactgctatcttgagtgtgtggcttagcatcatgtatcacgcctggtctatggggttctggagttgaaacaggacttcctgcgtgctaggaaaacactttccaaccaagatacatctctaccagaattccttttttggtattttttgtttgtttggggttttttttttggggggg

SEQ ID NO: 1945 - DNA, 262 bp, Homo sapiens
gactgaggcatgctgcagaagtgtccttccatcgatgactttgtggatgccctcgtgtctgacatgaatctggactttgaaacgttcttcctggattctaaatagcagcagcatggctcccgtggataagaaccttgtcaccagaccctccagctaggaaagctcgctccagcttcagcgatcactgaggagacattttctgacaagccttaaattgacaggactcagaataaatagtaatgttttaattacaaaaaaaaaa

SEQ ID NO: 1946 - DNA, 297 bp, Homo sapiens
  misc_feature (1)...(297): n = A,T,C or G
acacaatgtactccgcnacatccanctaactcaactgaanantgaaccgttncagcctccanaagggaagacagtgatggtggcactggaggcccagctcggaatgtcgtgggctgaggccaaggggcagcctctaccttantccctccaaccctactgggcaccttcccctgacctgcccanctcggaatgtctgtcttgggctgaagccaangggcagcctctaccttatttccaccaacctcaccgggcaccttcccccgactcatgcttttactggtaaaccgctgccactgg

SEQ ID NO: 1947 - DNA, 144 bp, Homo sapiens
  misc_feature (1)...(144): n = A,T,C or G
tgatctgcaaataaacgcaaacnacagggccacgcacgagcctcagcccgacgtgtcttcctcctgtcccgggtcaaacaattgtggcagtacccctntatctgtcncttnnagcttcnccnttgnccaaacccccgatttcca

SEQ ID NO: 1948 - DNA, 463 bp, Homo sapiens
  misc_feature (1)...(463): n = A,T,C or G
caagccggaccctccggaaggcgtgcgcctgcgcacagngggacacgcgcctgcaggtgctctggcatccccctgcttcctggcccttcccggacatcttctctctcaagtaccgactccgctaccggcgccgaggagcctctcacttccgccaggtgggacccattgaagccacgactttnaccctcaggaactcgaaaccccatgccaagtattgcatccaggtgtcagctcangacctcacagattatgggaaaccaagtgactggagcctccctgggcaagtagaaagtgcaccccataagccctgaagagggactggatccttgatatcagaccctgatgtcgtctacttgagggtggcagggtggcctgtcctgagtctgaatactgactttccatgtactgggctgctccgaagcactggataattcacttgattnttnagacctcaattttcaaa

SEQ ID NO: 1949 - DNA, 311 bp, Homo sapiens
gtctagggatcggaagatggtgggtgatgtgactggagcccaggcctacgcctccactgctaagtgcctgaacatcagcaccttggtcctcagcatcctgatggttgttatcaccattgttagtgtcatcatcattgttcttaacgctcaaaaccttcacacttaatagaggattccgacttccggtcctgaagtgcttcaccctccgcagctgcgtccctccttgcccctccctacacgcaggtgtaacactcatttatctatccacagtggattcaataaagtgcacttgataaccaccaaaaaaaaaa

SEQ ID NO: 1950 - DNA, 320 bp, Homo sapiens
  misc_feature (1)...(320): n = A,T,C or G
tttccaaaatgcctttccaggntagaaccaggctgcggatctgctggcgggacacaacagtccatgcatggacntccctantccattagaaccggaanaggtcagctcaggaccttttgaaaattcnatcaggcacccctcccctcctggaagaaaangtgaggaaacaatctggaatgagataggctgactaagcccctacaacctcattccctaaanaccgattattttaaagggtgcactgttctgccaatcatattgtgcctanttgctgatgctctattctgcccctggaaactgtntaaaaactcattgaccaa

SEQ ID NO: 1951 - DNA, 284 bp, Homo sapiens
  misc_feature (1)...(284): n = A,T,C or G
cttacctctcccaatagtatatcacgcgaatgtgaataccaccctgggtgaaatnggccatcttcccacnatactcccaaactctgatctgctcccantgtcacataacgcncangtgctgcgnccntggancctcncnctgtctctggatgnacnactnttgccacattaangntaagctaatgnttgactntgaaataaacatncctnncactgacntnggctnctnaaggcctggggaggcaggacgctcctctctttccctttggtaggtcttttggtct

SEQ ID NO: 1952 - DNA, 154 bp, Homo sapiens
  misc_feature (1)...(154): n = A,T,C or G
tttggggtaaatacaaacacnactgcggtngtatgaacctcnctctggcanaaatcaactgcatnggtcgtggtctttccccatccaggatttatcncngangcagtctnccaatttctgaaacctnatgcncatcanttactttgggctgaaa

SEQ ID NO: 1953 - DNA, 376 bp, Homo sapiens
ggtagactctctgctccaggttctcaaggaaaagggaggaactgccagctgaagggacaacgacaagggcggcttccaaggagcaaaacaaaacccttcaaagactgccttctgcaaacgtcaactctactggaccatcaacaagatttcctttgtgcaatttacttaactattctccttatctttcaaccgcaactaaactcgtgatttttcgagcagcatcttctggtttgaacttgtttctgtgaaccactcactacttagaaagagctttccaatgaacgctttttccagctaggctttttgttgattagattcagggctccaatttgctaccattcacaataaaaagcttccgtgatcacgctggccaaaa

SEQ ID NO: 1954 - DNA, 161 bp, Homo sapiens
  misc_feature (1)...(161): n = A,T,C or G
ggaaaaaacaaaaccncagtggattcaaantccataantaatttggaantaaanaccatncctgggancaagtcagtggacnctgggatctatctggacagtaattancaaatggatnancctgaaangggcatatgcataataattatttgtaagcaact

SEQ ID NO: 1955 - DNA, 185 bp, Homo sapiens
  misc_feature (1)...(185): n = A,T,C or G
aggaccggactggaataggaacatacagctggcaaaaccagtatgcgagcccagatatctaaatnctgcactgttttacatgtgtncctccagtgtcatcgaaactgttgtctanaacataaaaacatgttgggtaccctgaagaatgaagaaaggggactggtgaaaacatgggaagggcttta

SEQ ID NO: 1956 - DNA, 115 bp, Homo sapiens
  misc_feature (1)...(115): n = A,T,C or G
gggaccttcaacctgcgacctcgnttctttcncgctgccanatccgtcngtcangacnagtagtcacctcggcnctgagctcagctcanggtagcaccccgatgttggttccctt

SEQ ID NO: 1957 - DNA, 362 bp, Homo sapiens
gctctacatcacctgcctctcaaagtcgcgccagctaaccagatccccgataagctcaacaaagcctgttcgttcaacaagacttcccagagttggttgccagtagagggtgatgctgacatctgtgattgctgcagccatggcaactgtagtaattcaagctcttcacagttccagatccatggaccccgccagtggtccaagctagtttctcgaaaccgcaggcacgtgaccgatgaagctgatgtcactgtagggcccctgatattccttggaaaggccaacgaccagactgtggaaggctggactgcttctgctcaaacctctgtggctcttgggttaggcctggccacagtggcatt

SEQ ID NO: 1958 - DNA, 230 bp, Homo sapiens
  misc_feature (1)...(230): n = A,T,C or G
cctcttctgtttccgggaatcaaanggaaaataacatgtntgtgtgcnacccaccngggaaancccaanaagtggaaaatntgagaaaaagtggggtgcactggaatgtctgtcgctcnnaggaggagtggtggggnncttcnggaccctnngggggatgnaaatcgctncccttcttggggcctgtttatncaanttaatggtggaaataancccctttaacattaggt

SEQ ID NO: 1959 - DNA, 160 bp, Homo sapiens
  misc_feature (1)...(160): n = A,T,C or G
ggaatgggcctcccctcnaccctttataagcgangttgccnttaaacatttnancnttgcttgatcttgancananggaataaaggtccccacctccttccttcntaactggtntcgcaacantaaatatttgagctttgatcagtaaaacggaaaaaat

SEQ ID NO: 1960 - DNA, 103 bp, Homo sapiens
  misc_feature (1)...(103): n = A,T,C or G
atgaggtctaccttancctggtgctggactntgttccgganaccnngtaaagaatcgccaggacgctatatcggaggcatcgcagacaggccctgtgatctat

SEQ ID NO: 1961 - DNA, 130 bp, Homo sapiens
  misc_feature (1)...(130): n = A,T,C or G
aggggagcatgggcctctatactggaaaaggcctgggaaggataacttcactcaggaatacaaaatgacctaaatcacaggaccanctgtcccgtntcccattctctcccttaaaattaaggtttttgca

SEQ ID NO: 1962 - DNA, 201 bp, Homo sapiens
  misc_feature (1)...(201): n = A,T,C or G
tgcccaacgcagcccggatcgtgggagccgcgcgacccaggagtcgtccttgcacggcttgcaagaacatggcttgcttcanaaagaaaatagtttngtcttctctaacaacttactttcagctngtcgaaaatgaaaataaaaagcactggagagaaataatttctngcactttatgaatctatttttaaaataaaaaaa

SEQ ID NO: 1963 - DNA, 240 bp, Homo sapiens
  misc_feature (1)...(240): n = A,T,C or G
cagggatcctgaattgacctgggctctgggggcaatntggatgcctgtntgatcactgcagggggtgccaacctgcaaaaagcattnaccacccccnccgancctttgcaaaaacctggccgttaccnatttgctcctgnaaccacncctttcctnacccgggaantnaaacccctgaccctggaacttcttgaggaaactgtgcaggccatggaggtgaaataaattggcctaaaattt

SEQ ID NO: 1964 - DNA, 215 bp, Homo sapiens
ttaagcctgaaacctgcttgctagggttggagcttccccgctcaatctttctgcccgcccactgctggaacctgccgctttgctgttccgaagccatcacgtgatcaccctgctactggacttcaagattatttggcgggaattggggccctcccgcttcctttataactgagtgccgaaatagtaaaaattgaaccttgagcagaaaaaaaaaa

SEQ ID NO: 1965 - DNA, 103 bp, Homo sapiens
ggtgatggcaaggaactaactgaagacattactgccctgtccccctggaaatgccatagaaaagaaatagtaataaagtaatttaagaatcacaaaaaaaaaa

SEQ ID NO: 1966 - DNA, 192 bp, Homo sapiens
  misc_feature (1)...(192): n = A,T,C or G
gatggctgcagccccaaggatggagganaaaanccagagacttcaganncagcttactgattngaaattgncaancaannncatgactggactcagnttnacgcaggaatagcatgtccttaaagcacaagcncaatctggagnaggcntcangncaatcctgtancacataagttgaaaacctctggaaag

SEQ ID NO: 1967 - DNA, 380 bp, Homo sapiens
  misc_feature (1)...(380): n = A,T,C or G
atgcttgatgaagctgatcgtgacggggatggagagattaatgaggaagaattcttgaagatgatgaagaagaccagcctttattagctgcttggtgccttccaagaggtttggacctcctgttaacagctttcctgttaagcagttcaatgatgtaatacctgagtgtatccatttctacgtttagtttaggttagtcccttggtgtctaatctgtgccagaagttatatgtccctaccaatgtcattaaatctgtagtagtaagaaacaaacagacaaacaaacgcatgatttatttgaactgtgagccccaaaacagtatttccatatggtattttaaagtcgtanattccaaagacatttgacttttatttttcag

SEQ ID NO: 1968 - DNA, 250 bp, Homo sapiens
  misc_feature (1)...(250): n = A,T,C or G
gggtgaacagccagcagaatgtgcagcagagcccagaatccctcattgtcccagagggagccaggacctctctcaactggacttttaagtggncaggtggcttttaagtatttctggtgggtacagacagcattctgggaaagcccccaaggcactgatgtccatcttctccaatggtgaaaaagaagaagggagattcacaattcacctcaataaagccagtctgcatttctccctgcaaaaaaaaaaa

SEQ ID NO: 1969 - DNA, 261 bp, Homo sapiens
  misc_feature (1)...(261): n = A,T,C or G
tgaaaggttttgctagagcatcctgggnagaatcatcttggaggatgggtccagtcctgtatgacttgtaaaggaaagagtcaccttacctgngaatgtgccatccacctcataaatatccatttttaaaacaagctacttaaaatccacaacagaggactccctgtgccgctatccccccttgggacaatccacttcaatctgtttggctggcttgctttgctttgctaaataaactgcttccatgctgaaaaaaaaaaa

SEQ ID NO: 1970 - DNA, 479 bp, Homo sapiens
  misc_feature (1)...(479): n = A,T,C or G
tttaggtagctcctccgtacatcagctgctacaccaggtgcctggaacatgagtgcccctctgctggccccactctggactttttggttggaatcagttctgaaatggcaggggactggcatcagccagtcctcagaagacattcctgagcactgagttgtcgttactgaatgaagataatgtcactggatttgctcagggctctcaaagcaagatacacagtgtcatcagcgggctctggaaggtgggcagcgctgcctcattgtggaagtcctcccgaggctctcttccctgtttgctattgagctgttctcccctcttctggcccctggacctctccatatttctcaatcccatctgctttagtagctatggaaattctgtgtgcatttgctgtcttcttgccgatacgttttccttctctgncactttcacttttcattttcaaatgaaaataaaagtatttgttttgtggggag

SEQ ID NO: 1971 - DNA, 518 bp, Homo sapiens
  misc_feature (1)...(518): n = A,T,C or G
tccagaccccttccaggctgaggaccccttcaagtccgacccatttaaaggagctgaccccttcaaaggtgatcctttccaaagtgatcccttctcagagcagcagacagcagctacagacccatttggaggggatcctttcaaagaaagtgacccattccacagctcaagcagtgatgacttcttcaagaaacagacaaagaatgacccatttacctcagaccccttcacaaagaacccttccttaccttcaaagctcgacccatttgagtccagtgatcctttttcatcctccagcatctcctngaaaggttcagatccctttggaaccctagacccctttggaagcagctccttcagcagtgccgagggcttcgctgacttcagtcagatgtccaagcccccaccttctggccccttctcctcctncttgggaggnacaggattntcagatgacccctttaaaagtaaacaggacactnctggtctgccttcgaaaaagcccgcttctttcacgg

SEQ ID NO: 1972 - DNA, 369 bp, Homo sapiens
  misc_feature (1)...(369): n = A,T,C or G
ggtacattccttgaacttcnagcaacagatggccttgaccgcccactcaccgactgcaccatcgtcaacagtggcaagatagatgtgaaaacaccctttgtggttgaggtccctgattggtgacagaaatggcggaagacaggaaacacactggctggcccatgtgcacatctgtgatccaccagcagtcttttagttacttaaaagttgtagttaaaaaaatttctcatttaattttccagtctcgattgcaataacaaaatcaaccacacagtcagatgtctcaacaaacacctgtcatcccagtatttgggaagtgcangcaggaagatcaagggntnaaaggccagcctggctaacagtaagttt

SEQ ID NO: 1973 - DNA, 238 bp, Homo sapiens
  misc_feature (1)...(238): n = A,T,C or G
agaactgggtctgagccctgagacnccacatgtacnccagcaggaagctactgcagtggggtgagacagtcaaccacacttggacccaagctgactttccaggttctgactccacccttaggccttccagtgcacagctacttcctgcccctgaactgctcatacctccttcccttaggcagngctcttgatagacccacggtactgctcaccattatgtccgactcaaaaaaaagaa

SEQ ID NO: 1974 - DNA, 407 bp, Homo sapiens
  misc_feature (1)...(407): n = A,T,C or G
ccggagctcggccaagtggatataaaaggctagccacgccctggagggggctgtcttggagcattggaggagatggaaagttggagacccataccacacttcccaacatcctgaagaagttcaacccttccatcactggattctctactggtaccctggacaacaaggcaggattaaatgtggcagaagaaggagccagagctcaggacatgccggcccaggctaagaccctggtgaagaagatgaaaagcacacctacaatcaacctacaggaagactggaagctgattacactcctcattggaaacaacgacctgtgtctttactgtgagaatccggaggacaactcaactaaaagagtatgtcaagttcatccancaagccttggacattctctatgaggagtt

SEQ ID NO: 1975 - DNA, 440 bp, Homo sapiens
gaggtggggtctttcagacggctccacggccctgatgtgtgcatgtgagcacggacacaaggagatcaccgggctcctgctggctgtgcctagctgtgacatctcactcactgaccgcgacgggagcacagcactgatggtggccctggacgctgggcagagcgagatcgcatctatgctgtactcacgcatgaacatcaagtgctcgttcgctcccatgtcagactacgagagtccggcttcgtcttcagccgaggagtgaatacagggaggagccagtgagtcccccaggacccaccagccacaagccacgcatcaaaccgtccctcctccatccctctgtcccattctgcctcggcattcctcagcccctgaacttccctgagggagccctgacatctaccaggctcaagctcctggaagcctttcccagcacaggg

SEQ ID NO: 1976 - DNA, 165 bp, Homo sapiens
  misc_feature (1)...(165): n = A,T,C or G
gagccttaaggctcgtacnnnggaccgtatacctgcagactgccntnnncnnctcgtcctntgcagagaaattcccttcgccacatncttctcctgccaaactgaaagctgctgcaggccattgagccctgctgtcaaaggggtgggtgggactgggtggaggtt

SEQ ID NO: 1977 - DNA, 435 bp, Homo sapiens
  misc_feature (1)...(435): n = A,T,C or G
gattattattatacatctgnactgcgtttccagaaccccagctggcccgaactttactggatttaaacatgaaaatgcagcagctgaagaagaggcaggaccaggagctagcttccaaaccccagagcccgcaggataaggagatgaattccgagtgtggaagcgcatagtggagagtccgaggccaccactccaaagcaaccctgagccctcgccgtaacagggcgctctgaaaccctcctagcattaacactagcgatgcttatgtgtgctctaaaggacaatttgtccagcgaaaacttaggcttaaggaagaagtggggaaaaaagctaagaaagggggcgagacttttttgtttgtttgttttaaaaatgttcattcattggtttgactggttattgncttattagtcgaaaggaagaagggtgaaagga

SEQ ID NO: 1978 - DNA, 143 bp, Homo sapiens; identical to SEQ ID NO: 13
  misc_feature (1)...(143): n = A,T,C or G

SEQ ID NO: 1979 - DNA, 237 bp, Homo sapiens
  misc_feature (1)...(237): n = A,T,C or G
agatgccctctcttaggtttagaaatcgctggaataccaaagagcaacgcttcctctggtgggcagctgattcttatctgtacatgggacagggcgggggggcaggggggggggagtncatacatnangacccgnagggcttgnnggccaatcannctagnccagncagtaagctccangatccattgngnctgtggtcttcaagagctntgnacacccacagacataaaaataaag

SEQ ID NO: 1980 - DNA, 311 bp, Homo sapiens
gtcaaagcacagctcgaagaggaaaccaatgagaaatatgaaatattcaaagccgttgagtataaaactcaagttgtcgctggagtcaattacttcattaagatggatgtagggggtggttgtttcacccacataaaagtcttcaaggatctttctggaaagaataatttggaacttactggttaccagactaacaaaaccgaggatgatgagctgacctacttctaagcagcaaattctaaagtgacctgattcctctcattgtaaactgattcggccatcaataaagaaatattctccaaaaaaaaaaa

SEQ ID NO: 1981 - DNA, 241 bp, Homo sapiens
gatgcccctagacctggatgccctgtctccagaagagcgcagggcccggttccgaaaacgggaggctcagctccagcagaagagggaagaagagccagaggtggtggacagttttgacactgaacgatataaacagttttggaccaagaccaagaaataagtctgtcagggagttccaccagggacattttgtaaggatggagggcatctatctatttaccatacgttcttgaaaccataa

SEQ ID NO: 1982 - DNA, 483 bp, Homo sapiens
  misc_feature (1)...(483): n = A,T,C or G
cgcccccggaaccctgnttgnatctcctgaagngtcctgcngnccnaggaaagngaccctacncgccgttgaagncctcntngncncccacagacggntgcccagatcngcangacgagcatcnccgnncaccctcgccctngaccctncanccttctctagagacccctagaccttgaactnccactcccaacagcactgaccacctgtcccaccaggcctgataaactttaccatacttttcagcnaaaggtgacacatggangctctgaccaaccttatccatctacaacaaaaagcttgcatggggaattcatgttttgtgcctttgagatcaactccttagcataactatgacaaaattgngatttaaactgattaaatatgagatcaggtgaaagtaatagatacaaagtagaatcagcaaccaaaatgctctcatttttaataagccatgtaataaaattcctattatcttcataa

SEQ ID NO: 1983 - DNA, 310 bp, Homo sapiens
  misc_feature (1)...(310): n = A,T,C or G
gccccaaagaagctggaagcacttcagaagcacagactgggggagctgccagcccggaccggggatgagaacataacaccttaactncccattccccctgcaagcgcccgtcctggacaacgctttgcgcgcctttccctccgagatcaataaccgnaccctgcaccctccctccggggaactgattagaacaaccggccttcgctcctcgggtcactaaattctccacttcgacctttcctcccgcccactccccgaaagcacgtgcaaaaacgggtaaaacggtcttggtagctggcaaaaaaaaaaa

SEQ ID NO: 1984 - DNA, 397 bp, Homo sapiens
  misc_feature (1)...(397): n = A,T,C or G
ggcaggctgtagcgccaccaggctgcctggtgacgggcagacgagcaccggagacgcctcctcgcaagagcctccctcgtaccctcccatccaggtcatccaggccagagtgtcttccagcagctcctctgaggtctcctccatcaactcggacctggagnggnaccctgnagatgncanccttgaaaggaaaaaggacggngaacncnttagagtgcaggtgcgcanggnctgtnngagcccngtggatttggcctctgatgactaacatnntcgggagccaagncatnagntnggaactcaaagtcgggagtctgtcantgactagatggggaccaanctatnaggcnacccaggtnaggaatggaagctgctanngacactcctcagggagtga

SEQ ID NO: 1985 - DNA, 343 bp, Homo sapiens
  misc_feature (1)...(343): n = A,T,C or G
aaggtcagaacaacancaacaacagagacctnncaggttctcattctcattgcttaaaccacccagaagcatctttggcctattagncaagcagcaagatggcttgnagaaaagaatncatatcatatacgaacnantggagccaggctccaaancctnaactttncacaacccctggagcagcagcagcagcccgagggccaagcatccagagcactaaataattaaggtcagaacaacaacaacaacaagacctcccaggttctcattctcattgcttaaaccacccagaagcatctttggcctattagtcaacagcaagatggcttgaagaaaaaaataa

SEQ ID NO: 1986 - DNA, 120 bp, Homo sapiens
acccacacagtagcaaatgaaccaactctgacctcccctctccccctcccctctccttcccctctccagtagtcactccagagacacccaaaataaaaaatttaaatgtaaaaaaaaaaa

SEQ ID NO: 1987 - DNA, 120 bp, Homo sapiens
  misc_feature (1)...(120): n = A,T,C or G
cctctcttaggtttagaaatcgctggaataccaaagagcaacgcttcctctggtgggcanctgattcttatctgtacatgggacagggcggngggncangggggggggagttcttaaact

SEQ ID NO: 1988 - DNA, 356 bp, Homo sapiens
  misc_feature (1)...(356): n = A,T,C or G
gcaaggtgagaaaattattctggagttcctgtcgaaggtcttgcnggtgccctttactgccatgtcggaggagagcatctccgcgaagctgaagcaactgaaagccgaggtggtcgcaaagaacaacagcttcgtaaacgagatcatttcacggataaaggctccggctccgtgaggggacagtgggtgggcgtgcncgggggagctcacctttactgtgtgctgttctgggtagtgctccccactggaacctggcctagcagcatccggaagtgtttagtgatgcttgaaaacattaccgtctgtagctgggcgctgtttaaatggggacgggcanctgtgagcactatgctgaa

SEQ ID NO: 1989 - DNA, 152 bp, Homo sapiens
agcagggattcccaaggatgaagccttcagcggacgcttgagccccccgagccccaaacacaactgtaccctgttacttctgcttcagctctgaccttttccgtcctctgtaaatacaataaaacccccattctcatctgcaaaaaaaaaaa

SEQ ID NO: 1990 - DNA, 572 bp, Homo sapiens
  misc_feature (1)...(572): n = A,T,C or G
tcctcctgatctggaagaagctgccaaaactgaggctgagaatacgatcacctactcacttctcaagcatcccgaagccctggatgaagaaacagagcatgattaccagaaccacatttagtctcccttggcattgggaaaagcaagccagaaaggccaggatctagtgtctcctggtccaagggatgctgtagatattaaagaaaacatccagagtcacttctgtgagtcctgaaaccaacagacactaagagattggttcccagtggttgactgtactaatgactcccataacttacagcttcccaactcaagactcttctgctatcgatccacactgccactaaaattaatcaacttactgccgttaagagactgcagcaacgtgggaactgcttataattcacgctaagataaggagaacaattaatgttaggatgcatcatctcggtgatgataaaccagacttgtaccaacctgtcaaaggtgatgcttctttataaggaacttcaattttttttatttttctataaaggncgcatggtactttaatagtaaaatgttgtaaaaac

SEQ ID NO: 1991 - DNA, 207 bp, Homo sapiens; identical to SEQ ID NO: 14

SEQ ID NO: 1992 - DNA, 121 bp, Homo sapiens
ttaaggaattatcctctagtgaagtttccctgtgaagactcaaatctgattttctgagcatttctacccacagctggaagcagagctggatattaaaggagctacctctgaaaaaaaaaaa

SEQ ID NO: 1993 - DNA, 167 bp, Homo sapiens
  misc_feature (1)...(167): n = A,T,C or G
gactgagatgaggtcagcaagacccaganagcnncctgggtttgaccngaccacaagcccccctgaagatgtattctacaaacccgggcagctgggtcacctttgatgatgaccctgcttttcaatcttctcagaaaagaaaggatttttctctggaaaaaaaaaaa

SEQ ID NO: 1994 - DNA, 320 bp, Homo sapiens
  misc_feature (1)...(320): n = A,T,C or G
ggagccggtgtggcagcagtaccaagatggtgcccaggactgaagctaagtcttatgacttgtatctgacttcttcatacacctgaaagtaagccacgancatcgtgtgaactgcgcaggtacaccatgatgcaagatcngaccatatgacangtgatgattctggctgatggactgctgntacatggactgngctgatggggcgtggntgaggggttgtataagggattgcaattggcggcggaggngaangaaanattactananagantgantnctgnagaaagattcctgnntgcatgttgaaaggttcctgaata

SEQ ID NO: 1995 - DNA, 476 bp, Homo sapiens
  misc_feature (1)...(476): n = A,T,C or G
actgaggttgagtgaggatttgccatgtcccaggcattagcctgagtgaaacagggaagtcgccctctcaggaactgatttgagaccccgagactcccttccatgatgctctcagccaccatggaaacaccggaagccttctgtctgccaagccctgacctgggcgctagggagactgatgaattgatcggacatgacattcacactccagtaggctgggagagcatacctgaggaacttaacacagtctgcagacttactggagacggtctcatgtagtctaggctagctatggacttgctttgtaggtacagataggcttgattttcccccatttttgagacatggtctctctatgtaacccttggctctcctggaattctctgtggactaggctggttttgaatttacagaaatccacctgcctctctgcctctctggtgctgagattaaaggtgngcccaccaaaaaaaaaa

SEQ ID NO: 1996 - DNA, 450 bp, Homo sapiens
  misc_feature (1)...(450): n = A,T,C or G
agtaatatccattatgactcagggatgggctctaacttntccttctgttggaggtcanttcaggggtagcgtttgcctaatnnttagcgggggaagatgctagtgcncaagatctgcnatgtacactnncccctggacttcatcgccagcaagggagtcnanctggtgtccatcngggcctaaaanattgtggatggccntncccganacnacctgggagtgatcnggaccatcatcctcagatctgccattccacganttctctgtggaatanactctgcttgngacngaccctcctctggtgccatnataaatannccccctntganaagcgtcacntccccancttccttcncngctggaaangncaggntggcctccaatgctntntncctccggtccntgcctcnanttnatttgagtntnataanctntcgtaacggattaccc

SEQ ID NO: 1997 - DNA, 429 bp, Homo sapiens
  misc_feature (1)...(429): n = A,T,C or G
ggtcccagacagcatggggtctcggttcttcctggctctattcctggtcatcctgatgttgggaaatgaggtccaggggaaccaggaagatgactcgggcagcctggctctgctgggcacggtgcanggctccctcttaagttactggacctctgccaaggaggttgccaaagacctgtaccagaagacatacccgatcagcatggatganaaattnagggacatgtacagnanaagctcggcggncatgagcacttacgcaggcatttttacagaccagctccttactctcctgaggggagagtagctgccaaagcaagccccaagttaggggaaaggaaaacctgatgacagacaccgcgcctctttgctcgcgtcaccagaccaggatggncctacaccaccctgtcccaactggtccgctttctg

SEQ ID NO: 1998 - DNA, 106 bp, Homo sapiens
  misc_feature (1)...(106): n = A,T,C or G
aaattcttgtggataaaacacncaatggatnntgtaaggaagcagcctcncgcttacgcttcccctngcccagatctttcccancatgggaaatatcctccctctc

SEQ ID NO: 1999 - DNA, 286 bp, Homo sapiens
  misc_feature (1)...(286): n = A,T,C or G
gactgacgctacttggcctttgagctatgacaaagacaactgtgatgtacaattccacccagagatactgcacctacagtgtggtggatcggaagnacccagggaagacctgtcgagttgacagctggactatgtaaatgtgcttcgtgtgggcccaaaagtggagtaacatttgaaccttgtatgatttaaatttaccaatcataagcttgcaaggaggtgacctgtaatcccagcactcagaaggcagaggcagcatatcttgaaaaactcaaataaataaaaa

SEQ ID NO: 2000 - DNA, 419 bp, Homo sapiens
  misc_feature (1)...(419): n = A,T,C or G
cgacctactgctcaccgccgtcgncaccagncgtncggcacctccgncaccactaccagcacccccaccccagccacagcagccccacttcctcccaccaggctacctctctgctctccacttcctgccaccgccgccaccgccaccatctccaccatctttctcgctgacctacgatacagacaaggagaataccaangaccaggatgcagaagcacccaccgagcccagccaggactctccccaggagcagtccaactaagctgcangccacctggaaggccaccgggtggngacgggcatagatggcgggggttatttttttcaccatggtcatggnatnattaggaagaaagggatactgatanggngtaagaaggcaggcggaatncctactncaggntagaaagggcacaagg

SEQ ID NO: 2001 - DNA, 567 bp, Homo sapiens
  misc_feature (1)...(567): n = A,T,C or G
acaccattcaagcttgcagaggatctgacaagatgaagcccagacatgcacctgaaggcacgggaggctgctgtggcaagaggaaaaactgctagatctacggccagcgcggagcccaccgggctcaagagggtggctaaaggacagtcacagaggcttcttagcctgctcttcgccagtgcacagattatgtgaaggtggcaaagccaccacaagctagaccactgctaagaataagagtgacttttagaggatgttaattgaaggttcacagcaaatcgcctgcttttctatttctctatctcagagttctggtgccacctagtggtcagaagtanaacttggaagcccaaggtttactcaaagggccaaaggcatcatcaacgttgtgagaattatcttccttctggcctaccacaggacacctctgggttcttctctgtggttaccaggaancacagtacttactaaatttatgctaaccatgacaaaanattgtcactccaaatttgctaggaattattctttaggttgctgtctgcaatttttttctctgtactgaatgaa

SEQ ID NO: 2002 - DNA, 239 bp, Homo sapiens
  misc_feature (1)...(239): n = A,T,C or G
gtggcaggaagaggantagtgcnggagaggagatggagagaaaactgggcctgtcctgtgatgcacttctgccagcaangccacgcctcccagtccctgaagtgtcactccctgaagatgaagcattcaaatatgagtcgatgagagccattcttgttcacgtcgccatanttgtggaggttggacccagcactcaanactgttataaagaatttttgctttggttttaaaaaaaaaaa

SEQ ID NO: 2003 - DNA, 279 bp, Homo sapiens
  misc_feature (1)...(279): n = A,T,C or G
tggtccaaacaatgcggttacggagcgcggggtggcgaggccagaggtcagatccagacaccttatgtactcgagatgctacctgaagagtcnatgatcagcctcggatcgatcaactctctccagagcacggtgatctgagggaaaaatacaaaacaccacacttaattcattcttgactccacgtangctnaaaactatggatnagttnagcaagtttctgtgaagaatggttagatgatgaaaatactttcaaagctgataaaactgagtttaatc

SEQ ID NO: 2004 - DNA, 631 bp, Homo sapiens
  misc_feature (1)...(631): n = A,T,C or G
tggacctgagcagactggaagccangatgcggctctggatggcatcaccgtagctgtggaccgggcaacctgaatgtggacaagcaaaacggcgtatgaaaaaactgatgtantggggcaagctgtaaacagccacccctggcatggctctgctgattctattgctattagcccttttcctttcccctgagancgggaagccattctgggtactgtgaaactatgaagccctacctgggaatacaccttcctaggatgggccaggagaagccacaatatgcatgaacatgtatgtttcccggggccctaancatgaaggccatgtcctgttcangcaanaatcgccaccgtagcgtagccatccttcctgtccacactganaacccggcgttgaactgccattgtggcatcatgttgtcacatcatattgtcatcttttcaccatttttgccaaacagtaaaaaaaaatgtcagtcattctgggtctggctctgccatccacttgccanaaacatcaattccccttcnaatgctgctgtcccccctgccacctttcctgntcatcagttaaaattctgttancaataacccctgntttnccttcctaaaaaatgtttattccaatgaattt

SEQ ID NO: 2005 - DNA, 723 bp, Homo sapiens
  misc_feature (1)...(723): n = A,T,C or G
cgggccttaatccaacntgtgtatcctatgaggtcngtggctcaatnncngtgtgtccccaanggacnctcctgtnactttgccagtncatttctatnagancggacacctnttgttctgtgtgtcnacngcgtcgnggttgatantganccttcancatnctnctcatgcncccatanattcaccatttggactctgtcactaaatcacataagatacagtanccncatttgctattcaatcctaagccattttgcacacctgctggtgtnatatttttaatnttattcaatttttgtttttgttttttaaaacaaaatttctctgtgaagctcttcctgtcctgatagtaggtatagaaaccacataagccagctgacatagttttgtgcaataagcatatagttttgtgcagcnttcnaccacatctttaattttgaaaattgggcaaatatataggttatattcnaatttctaagganggcatatctcataacatcaatgctatccaaggcttcaaaatcattggaatgcntggtnaactaantcttttggttgttcnaaaaatgttgaataaattggaattttngccnntgtncatgganatnatnacatatnttcncncccttnagaatgtcacaaaaanactcanaacncccgaactccngtaangggtattgttgaancccatncttncctnaaattgacccccttgaagaaaaa

SEQ ID NO: 2006 - DNA, 653 bp, Homo sapiens
  misc_feature (1)...(653): n = A,T,C or G
agccagcaataataattacaatcactgatgggagcaagttgactactactagtgggtgtccagggatgaagcttcatttacctctgaattcgccgttgcctggaagtgaattgaccaaggaaccttttcgttgggatcagagactatttgctttagtgctgcggttgcctggcaccatgtcggtggaatcagaacagttgacaggtgtgcctttggatgattctgctatcacaccaatgtgtgaagtgacaggaggccggtcatactctgtatgttctccaagaaatgcttaatcagtgtctggaatccttggtgcagaaagtacaaagtggggtggtaataaactttgaaaaggcaggaccagatcctccccctgctgaagcagaagggcagccagatatatcaagaccttttggatctcagccttggcatagctgtcacaagctcatatntgtcagaccnnatcctaaaactggggttcctataggccattggccctgttccanantctttttggccagatcagaattctccaacactaccacctccgtacatctcacctgtagtgaaattttccngttccanactgtnaccnatggttattgancaattcgccttttgaacaatataatttgaaccttcccccctgactc

SEQ ID NO: 2007 - DNA, 228 bp, Homo sapiens
ggaatcaactgaggtgccctacggaagaacaggctgaaaacaaaaccggactactactgatgcagcagctacttggctgcacagcgagaaataaacctacagaatgttcaaggaaatattgctaaaatatttttgtaatatttgatatgtaatcattacatttagtcaaaaaattcagatttctagaaaatataaagtttttttttgtcgattcctcaaaaaaaaaaa

SEQ ID NO: 2008 - DNA, 520 bp, Homo sapiens
  misc_feature (1)...(520): n = A,T,C or G
cagcctggggttcatctcagggataccatgtggcacagctgacattttaaaacgcaaatgatcctttgtactttcataagttcatcagtcttttaaagaggatgctgaaatctttttttctgatcttcagattagacagtcatgttgctatggtggttgctaagattctaacagcagtgcaatttgaaaacaaacactgtgctcanggtgtttttcagcacacaccaaatatcccaactgtcttaatggcggctgaatcccaaanaagcaattgcnaatgcacattctccttggcattcttanctggtttttaagcggattatttacnacnnaatttcaccagaaaantntcngttggccttgttgaatgcagcttttttttgaaggccgntggaccctnctcctttccttgttgnaaccnggataaggggccgccgtgnctggtcccaaatcncncctgttacnctggcgnttccaanaatttcccnctggtaaggngtnaagcgccctgtcccttccc

SEQ ID NO: 2009 - DNA, 403 bp, Homo sapiens
gatggcctgcagtggagggaacattcggaaagcaccgacttatccttaacaagcaacaataaaaagccactaccccgtcatggaccggggagacggctcaatgggtaactcgtgcacgattgaggatctgaactcaagtcctcagaagccacgaaaagccggattcaaaagcattcacatctgtaattccagaggctgtttggggagacaggaggcacagacaggacagtccctggaagccagtgggtcagcttgcctggtgtacacaggccaaacaagagacggctgtcttaaaacaggagcagccctgatgttgccctctgaccttcacaccccttgtgcttgcattaaaaatatgtattttatttagaaataaaagtatgcgtacttgagaaaaaaaaaa

SEQ ID NO: 2010 - DNA, 497 bp, Homo sapiens
  misc_feature (1)...(497): n = A,T,C or G
gagttcctacattctcangatcgaagactacatctncccgaaaacctgaatggctnttgttnccactgaccagtcttccctctnaatgncgtggnacnngtccnntntaagataccacatccttctnatnagttcatnatgagtggttgcctgttgntnannaagaatncggaactgnaccccaacaccaaataganaanatctcagactgangatnanttnccagatagtnatgagngatttanggancctcacaaancnaacnactntgntgactcnnaaaaccttcccanaagggcgtcatcgggtggcttccantttcctttctcccattcccccagtgctactaatggactgtcagtacccacggtnagtctgtatgagtcngacgccccancnanttctaatgtggctcttccaaaactacaagcctggctacatcngtgacagccncaaagggaaatttggttggcttggtaaactatcccgatgatgaa

SEQ ID NO: 2011 - DNA, 106 bp, Homo sapiens
  misc_feature (1)...(106): n = A,T,C or G
ccaccccctggaagctctgtgtcttnctagggacagtggcacagtctnttggataatgttgccttggaaacttcccgctgtnttaagaatggaatgtgtcagtgaa

SEQ ID NO: 2012 - DNA, 141 bp, Homo sapiens
  misc_feature (1)...(141): n = A,T,C or G
tgttttgagcgagaacatcgcgtcttcagggaactcgggactggcagatcttcagtgtgaagtgcacacgccatcgagcgangtttggaggcatacggaggagggagctgcttcatacagtctacttcaagtaaaaaaaaa

SEQ ID NO: 2013 - DNA, 213 bp, Homo sapiens
ggaagatgaaaatgaagctgaaaagaaaaacgcatctcaggagctcagcatggagcagaaaactccaaagaagtaaaggattgtccagtgtgttctgaagcgtgtacaacttaggctcaagcagataaccgtttctgatttataaaatgttaattgtaaaatctaatttacaaaactgttctcaataaagtccttgaaataggaaaaaaaaaa

SEQ ID NO: 2014 - DNA, 467 bp, Homo sapiens
  misc_feature (1)...(467): n = A,T,C or G
aaagttcagatcaatacnacacgtnantcattatctntntccgggtcttngacnnagccatccggctctcggatcatnttgtancaccnanacnntcnccacnctganggcggntcgctacngccccctaacggggganggacgtaattacatccctgggggctttgggggggggctgtccctctagaaccccatcctcactgactccgtcctggagttggatgaaanataatggccttacnttntgccaggggagggtcgggctggatttancaaaatttaccttctccaaanancggtgctgcagtggcacagctgcccacggaggtgggggggtccccgtccctggaggtgatnaaaaatgtggggatntggcactgagggacatggccnntgggcacngtgggtgggttggggttggtcttgggggatcttggaaggttcccggggatctagggatctaggga

SEQ ID NO: 2015 - DNA, 241 bp, Homo sapiens
ttgcaggtcaaagacagcgagaaggttcagaggaaagcgatcccgtgccaccttccccgtgcccgggctgtccccgcacgctgccggctcggggatgcggggggagccccttcatctgcctccctttcccaccatccacccctccattttcttttcagaaaatggctgaaaggcgaaaggctggctctaccaccaccaccacccacacacacacacatcaaccagccatgacatatcatgt

SEQ ID NO: 2016 - DNA, 167 bp, Homo sapiens
  misc_feature (1)...(167): n = A,T,C or G
gagtgtgctatggaagccanaagagggcgctagatncctggaacggagttgcaggcagttgtgagccaccatatggtgttaagaactgaaacctgggtcttctacaaaaaacaagtgttttgaaatgctnagccatctccccagtgcctacattaaaaacaaaaaca

SEQ ID NO: 2017 - DNA, 200 bp, Homo sapiens
  misc_feature (1)...(200): n = A,T,C or G
taggcgattgtacaatcngtnacacctgtagaggtggagctnaccnntcgnggttaaagagcacanaacccttcctggaattcctctnncttacantaaaanctgggcctgtgattctaccacgtgtctccnttcccaaatgcaaagacccctgcatncagganattcttctgaataaatgctttttgcttttgcatact

SEQ ID NO: 2018 - DNA, 352 bp, Homo sapiens
  misc_feature (1)...(352): n = A,T,C or G
aggtgcaggccgactggactcatganganaaacccatctccngaccctctactgacaccnaggggcatggtgacagtgcagagccagggaaccagagtccagtnactcctgccaaccatggaccctcgacctcctgtgctgtccctgtatccagaactgggccacagaggtttgtagagcctgggacagggacacaccagagctnaggccgcattgcttttgtcnaagtctcctcctctnactggtttcaggaaatcaagaagtttgaatcacatactcattttacttgaaattatgtcnctngacaacttatattttgggantcttgagattgtttttctcttttcttatt

SEQ ID NO: 2019 - DNA, 962 bp, Homo sapiens
  misc_feature (1)...(962): n = A,T,C or G
ctgagatctctgagaagtacggcctccccgaggagaatatttgcaaagtctacaagaaatgcaagcgaggcatcctggttaacatggacaacaacatcatccaacactacagcaaccacgtggccttcctgctggacatgggtgagctggacggcaagatccagatcatcctgaaggagctatgagggcccggcctcaagcgtcccacacccggggcccggctcaagccacgtacaacctcttctgtgtcagctgttacttgaaatgcctttctttgggaaagaggtctcgcaagcaaccaactcggtgatgtccaagccagggagagaccaagaaggttccaggatctaaatgtcccacccaggctcgaactcactccagagcttcctgaaagcacccagcccaccggagagtctgagcaacacagacccaactgcctgctttctcttctaagtcccgctgcagaggcccttacaggggacgggggtcacaccaccttctctgcagggctacacccgctgtctcgatcggttctgacgttcactggttcctttctaccaactttagaccagagagttctcacactttgggccaatacttgaaaactcgngacttttacagcagatgcctttgtgaaggcccttgganaaggaaaacttttcttaattggacntttcttcgggcancaaagaatgtaaaggtcacccattcaatnnnaancctggaccaggggaaccnaaaattaccccttttggccaancttaacctgggttgggnanccccaattttccnttnaattttaccanggttttttccaattttattggngggaattnntttattnatnnattanntantnatgngggtnaaaggtnnttanttaaatttnaatgggnnccccctttttnattgggcccaaacnatttttttgggnnaaatggggtcccccattgggttaaaca

SEQ ID NO: 2020 - DNA, 163 bp, Homo sapiens
  misc_feature (1)...(163): n = A,T,C or G
tgtactctttacctcctgngcgacnngnattccgcgaatcgacataggcttcattacgttgggactaancgaccttgaatggatncnagtgactactaccagatggaaccgancntgctantcttngttcacgaagacttgnaatgtgaagaccttttgaaaa

SEQ ID NO: 2021 - DNA, 427 bp, Homo sapiens
  misc_feature (1)...(427): n = A,T,C or G
ccagtgtggagactccctctgctgaccagagtgaatcccaggctccgactggtctgcctttctctgcaggagccggagctcccaaccctccacaagcatctgctgcttcgtcttgatgacactgcctaaggtggccccaaagtttccaggaccccanacactggagtgaggaatcctgccccactgtgatttctagttattctggtgtcagcatgccttggagacactgaaaacggcanatcacagcatgataatggtgtttcctccaattgggttanaacacctacactcanaggtgaccctccctgagtgcttgggttctgccttgtgganaaagcaggacggagaccttgccccttatnattgattgtattgtgataggccctttgggctacaataaacttctctgaggactttcaaaaaaaaa

SEQ ID NO: 2022 - DNA, 397 bp, Homo sapiens
  misc_feature (1)...(397): n = A,T,C or G
cgggcttcccaaggaaagcctctaagaagagcggatgccctgacctcgctgccaggaaagaaatggctatgaaaatgggctttgaggaatcaagaactcaagcatggtttgagaagcaatggaccctaaattctgagcatagagaagagcccatgagtttatcaagacatggcacaaatgaggggacacccccagccactcagtggcagtacctcaacagagtcactcccccagtctgttgtctcccttcctctaatccctgctgggatgaccacgcatccctacctgcccctcttagctcgcaggcatttgttccttgggatccctcttggggtctttgggagccaagtgccaagccctgcgatcatgcanancccataaagcttgtcagcaaaga

SEQ ID NO: 2023 - DNA, 141 bp, Homo sapiens
aggtgcttggccctgcgtgagaaagcaagagatccacagcggctgttactgttacggagtattggactcacatggcttctctgacccacaaccttccctggaaataaagagccccagcttggagtttcattaaaaaaaaaa

SEQ ID NO: 2024 - DNA, 159 bp, Homo sapiens
  misc_feature (1)...(159): n = A,T,C or G
ggtaagtctcgaaattcgatatcaagctgatccggaacccttagtataacttcgtataatgtatgctatactgaagggtatcnngnncntttgacctgcagnctcaagctagcttatcngagacccgtnnacctcngacctcnagaaggagcgagggca

SEQ ID NO: 2025 - DNA, 149 bp, Homo sapiens
aagcatagctactcagagagtcgtccctccaaaggaactcttccgcgtgaagcccatcttggtacatctctggacacgactgccccagccactggagtactctagccattgtcccatcctgtttattaaaacgtttgaaaagaaaaaaa

SEQ ID NO: 2026 - DNA, 114 bp, Homo sapiens
ggacaaaagaatccgagtgtctcaacccctgacaagaggaccaagtgcctttattccagagaaggaagtatggccatttgtttttaatacattatctagtcaaaaactaaaaaa

SEQ ID NO: 2027 - DNA, 121 bp, Homo sapiens
ttgatgcttccaaagcattgaggaagtccataaagaaatccgtgcacactctgaggacgccatccgaaacgctgcacagaggccactgggggagctattttaaataaatcagtttccattg

SEQ ID NO: 2028 - DNA, 171 bp, Homo sapiens
aatatagtccctacagcgtcgagagacggaggtctacgcctgtatgaaggaagagactggaagccctgtcttcagccaaagcccagccaccaaggagaagctgaatagatttgaggatgacaacgaatttaaccttgtctatgaaaatctctagaaattcaaaaaaaaaaa

SEQ ID NO: 2029 - DNA, 154 bp, Homo sapiens
actttaggtctccgaagaagatatgggcacagtgacaagattctacctggactgtggtatgataaccactgagaaacactgctccattgccttgcccactgtcaaagcttggcctacactgtggataaatagaggctacccagagaaaaaaaaa

SEQ ID NO: 2030 - DNA, 119 bp, Homo sapiens
  misc_feature (1)...(119): n = A,T,C or G
tgttcattgctgactcggcccttganataaatctgganacagcatccagccgatcacctactggctggcgaagggcaccaagaatggattgtttggggggggcgggggaggaatggtgg

SEQ ID NO: 2031 - DNA, 154 bp, Homo sapiens
cctgcgaaacgactgggtgactggccggaggatgtggctgctcttggttctggctacccttgtgtcctctgggaaccccacatccctgtcagccagcccatgccccgccagctcatggagctcaaagaaataaaatgaaaaacaaaagactcag

SEQ ID NO: 2032 - DNA, 460 bp, Homo sapiens
  misc_feature (1)...(460): n = A,T,C or G
cttgtgcttctggaacgcctccancttttcgtcccntgcttcgatnagatccccatcatcctctcaggtcccagtctctgagaataacccggaagaactccactatgctgctctcaacttctcccgcctgagactgcaggagacccaggatccccaagacacctattctgattacacagaggtcagagtccactgagggtgtcctggggcttaggactgagacctaaatggtaaagtagttaagggagcctccaaaagaaagcagatgctctccttaaaaataatcctgggggtagggggtgttaaatatgtgtgccaccaagcttgatgaactcttagattgatcccgaggacccgcatcgtggaagggacctcccacaaactgacctttgactccccacatgtgcactgtggctcatgcctatgcatgcacatacatgtaagttaataaatagatgtc

SEQ ID NO: 2033 - DNA, 151 bp, Homo sapiens
  misc_feature (1)...(151): n = A,T,C or G
cactggcctctcatccactcactgactctggggtgtggttgaaccatttgagggcctgactctcccttttgttatctcaagttggacaaaagctgctgttgtgaacttagtctcaggtgtcaatatcctgtcctntgccaccagagagttg

SEQ ID NO: 2034 - DNA, 247 bp, Homo sapiens
agggggaaagagatggcgatatgctagcgactggcgcacgcggagcgagggcaccgtggaaccgccgacgctcaggatccccggacaatcctgtgcctttggcggtgtgtggagcgctctcgacgttaaagcccagtaaatagacgaaggacttgtttcaatttcaacttcacaaggatccctttctaatcactcctttcttccctgattttttttaattaaaaaatacagatcaaagtaaaaaaaa

SEQ ID NO: 2035 - DNA, 163 bp, Homo sapiens
  misc_feature (1)...(163): n = A,T,C or G
ttaatgagcacctgtcccnttntgccaatgagcctgantctgaggaagagctgcagcacaccaccagaagttttttggtgcatttntctctatggagtnctgacaaatgaagctcaattacacaacgtaaggtgaaccaatacatgcactgttagcgaagact

SEQ ID NO: 2036 - DNA, 582 bp, Homo sapiens
gattacgacctttcaagatgagggactttatcaaccaacaagctgacgcttatgtggagaagggcatcctcgacaaggaagaagccaacgccatcaaacgcatctacagcagcctgtgaaaatggcgggcagcttgagccttcctgttgttccagcaaaaacaatatagcttacaaactaattcggcggttaaagggttaccagcccagaagtattaggatgtgctgaatttatagtagttaatcccttagaaatgagtaaaatagagctctcttgccataaataccttatgaaaagcaaagctgtagagaagccgaggtttttctatatagaatccttatttcctcttgaatttacattttgtaatcagagatgtgctgctctggaaaagactctaatgggttgaacataagtctgaacctactccccactgtcctcagccccctgaagctctgagaggccctgtctcggcatgctagacacctgagcacctcactggatgtttgtcataggatgtcgtttccactagtcgatctctgttgggcacggaaataaacccacgtctcttcatatccttgaaaa

SEQ ID NO: 2037 - DNA, 173 bp, Homo sapiens
ggaacttctgttgaagaacttcgtggaagctctccttggtaataacagaaggctgaaacaaccccaagatccattcgaagaagatggagaagcatgttataatccatctagatggcggaatattacatagcagtaccaatagataaatatagctttgtgccacaaaaaaaaaa

SEQ ID NO: 2038 - DNA, 105 bp, Homo sapiens
  misc_feature (1)...(105): n = A,T,C or G
gctggttccaggctccaagaatgaattggnaagaatgggcctnccccctcctttataaagcatatncttgnattaaacatgtgaactttgagcagaaaaaaaaaa

SEQ ID NO: 2039 - DNA, 222 bp, Homo sapiens
taaggaatgcaatgacaaatgaggaacctctacctctgtgagctgctaactacatctagactctctctgctgtctgaatcacagcagggcaccttgagaagatgctccctctagcttgttaggatgctgaggggaaagagtgaggcaaagcctgggtaatgccatatccctcaactcacttcatgaaacatcctaataaaagtatttctactaaaaaaaaaa

SEQ ID NO: 2040 - DNA, 237 bp, Homo sapiens
  misc_feature (1)...(237): n = A,T,C or G
taccctgagctggcccaatggagccttacagaactaatcaggacttgtggagacctctgcactgaacttcctataagtaacttccaccacactggtttctactctcagaactgccccagtgcttgctgggtagacttttcatctaagacagtggatttttnaaaaagaccttttttctattgnttgagaaaaatcattgnttcttgtgaaactgcgtgtcttccctaaaaataatat

SEQ ID NO: 2041 - DNA, 220 bp, Homo sapiens
  misc_feature (1)...(220): n = A,T,C or G
tccctgactgccagcgatagacccagcacccagngaatcccctgtctacctcccgtggtgattccataaatccaccacaccccagagggagcagcatccctgggagatggcatcggtgcatggtccacagtgtatgggttgggccctttgatgtatcaaagcctttgatttaattctgggtggggctgaataaaccaaaacctgggggcaaaaaaaaaaa

SEQ ID NO: 2042 - DNA, 257 bp, Homo sapiens
  misc_feature (1)...(257): n = A,T,C or G
atgccccggtgccaaatggcganngcgaaggagccgtacaagaangcncaanataggagactnttccttcagagactaagggactgggggaatcacacagaacgngnnagaatgtatntacgntctanaaaagagcctacgctctatctagctctccgtgataaacatcaccaaatgctactgcatacctccccaacctttctctgtttaaaaataattataataataaagcatttataatctttcaaaaaaaaaaa

SEQ ID NO: 2043 - DNA, 101 bp, Homo sapiens
  misc_feature (1)...(101): n = A,T,C or G
acacatgtgacatcttaagctgccccaaaggattcacatgctgngacaatgaatgctgcccagaaagaaaggtctgggattctgcaaataaccccttcagg

SEQ ID NO: 2044 - DNA, 154 bp, Homo sapiens
  misc_feature (1)...(154): n = A,T,C or G
gtaacctccccagcctgaaacctgtttgctcaggtttcanaagagagcatcggggcnggagcttgccgccctaccattctgccactcccactgctgaggcctgctgctttgctgntccagagtcaaacacgtggncacctgcaactttactcca

SEQ ID NO: 2045 - DNA, 181 bp, Homo sapiens
ggtgcaagtgctagatgctcaagaggacacataagcagacccgaaacacggcttgacttccatgagcgacaggaccagccctacagcgaccatggatgtgccgcgatcactgcttcttcacgaataaattcaccctcgaactgttaaatcaataaagcctactgcagcccaaaaaaaaaaa

SEQ ID NO: 2046 - DNA, 160 bp, Homo sapiens
agagagtgaattagatgtatcctttttctgtacatgtttccatggtatgtggcaaaaatcacactcaggatgtgaccaggtactgcagggttgcagtgtgatgcaagcatggcagttgtccatcagccaataaacttcaaattgacttgaaaaaaaaaaa

SEQ ID NO: 2047 - DNA, 163 bp, Homo sapiens
  misc_feature (1)...(163): n = A,T,C or G
ggtaagtctcgaaattcgatatcaagctgatccggaaccgttaatataacttngtataatgtatgcnatacgaaggtatnangnaccncgggaacctgaagagccanggggggtgcacctttctactggaccagganatgatncccccggaaatcgggtcccc

SEQ ID NO: 2048 - DNA, 552 bp, Homo sapiens
  misc_feature (1)...(552): n = A,T,C or G
aagatcctggagagctctcagactctgcttagngtactcaaaagagaagctgggaacctgactaaagccacagcttcagaccagaagagtagtggaggcaaggacagctgacgagtgcctgtttcanccgnggcctatggctgcttagtcctnaacatgtctgtcctaaagcatctttgntcttngnggcctcagatgncttttatctctggtgcccagaggggcaatntntgacctccacctgcctanacaagaaaagccctaggacagtccaatggaagaggtgttcccagctccgtactcacatgtgctgtggggaccctgagcagctccatgaggggcctctctctgaagctcctgaatccctttgggctaccaggaatgtcctggtcctggtctgagtactgtgggagcccctcactttgtctccccagccactagggccccaggccagacatgttgaagaaagaatcttgacttcagaaccaaaaccttagggcccatncccatggcctctggtgtttcaataaaggntggtttgcaagaaaaaaa

SEQ ID NO: 2049 - DNA, 211 bp, Homo sapiens; identical to SEQ ID NO: 15
  misc_feature (1)...(211): n = A,T,C or G

SEQ ID NO: 2050 - DNA, 200 bp, Homo sapiens
  misc_feature (1)...(200): n = A,T,C or G
ggaggggagaagatcaattctgaaagtgcaaccaagcatatgaaaacancagtctnctgttnagctagtattggaggagaaaaacaaccaacctacgctactatgtatacttgataaatttttcatggaaagggtgaatcagtgaatcgacttcggatttgctggtttaaatatgntgactgttgaaacgacagtgaatg

SEQ ID NO: 2051 - DNA, 127 bp, Homo sapiens
ggaaaacctggagagctgaagaagaggattattctaacccagactgaacatcacgtcctctgacagattgggtgggcgattgatttctgacaattaaaacattctgttttcaattcaaaaaaaaaaa

SEQ ID NO: 2052 - DNA, 456 bp, Homo sapiens
  misc_feature (1)...(456): n = A,T,C or G
gctctccagatcaggcctaagtggatcactgacctggctaanagtaccaagaaggcctggatcattgnggtgcctctctncagaaaatggtgacanaaattgaaatcaaccancacatnaggatcctctgtggcaagaccangataataatgggggacactgtnatctggcactgnggntccttcacgacaacagtggctggtgggtcctagatttacaacatcacttctgctgtcacagtcaaaccggccatcangagactgaaggaaattaaagaccantanaagtgctactgtttgagcanccntggcctgcaatanatganttcattcctatgaanggttgnantanagtgttggtngantannntncttcaaactggagtgagcggnaccttnanaagaccttancccccagaccagcttngccagccctccacaagcccccaccagaacc

SEQ ID NO: 2053 - DNA, 284 bp, Homo sapiens
  misc_feature (1)...(284): n = A,T,C or G
acccttgacttttagggatttgctgctacaactgtaataatgaaatgactggaattaccactttctatccgactaaagaaaggaatctgaaactctgccctacagtgatctgagcatgagagcatttattgaaaaaaatttttcccatctgagacctccaatttacagaagagccagaagcctctatgggctttcttccctactgacatcaacacccagcctattgaaaaaaaacttaaaactttggttgaaggtnggaaggtgggngataatggacagactta

SEQ ID NO: 2054 - DNA, 244 bp, Homo sapiens
  misc_feature (1)...(244): n = A,T,C or G
gagctatgacaaagacgactgcgatgnacanttccacccagagaactgnncctacngngngntggatcagaacgaacccaggaaagacntgttgagntgacatgangctctatagaaangtccttgcntgtgggnccaaaagtgnagtntnatttnaccttgaccgatcaatgcgaccngtcatangcttgcatggaggtnacctgcactcctagcactcntaangcataggcagcatatcttg

SEQ ID NO: 2055 - DNA, 208 bp, Homo sapiens
  misc_feature (1)...(208): n = A,T,C or G
ctcccgagtctgtctgcggccctgatcgatcagcagtggtctgagttcatctgctcaaataagatgaacgatcagagacagccaactcccgagtctgtgctgacgtcctcactgtnagtnnttgctgcctaattcnaataaagatnntgtttngnnnnannatcacatttaaaacaaaganctaccaccctatcatcgatgagaaggg

SEQ ID NO: 2056 - DNA, 257 bp, Homo sapiens
  misc_feature (1)...(257): n = A,T,C or G
gaactacgctgccatgaagctggtgaanccctttacgatgaagaagacatctgctctggagaagggggtgcaggctgcctcctggcccaggactagctgctcctccattgctctggggcctggtggtcttgcgcatgtccatggagttcttgggaatcacgttattttcatcttctctttctcccctaacccaacactcctctggataaactcttggctttctcagtataaagcagacagaaccagaaaataaaaaa

SEQ ID NO: 2057 - DNA, 329 bp, Homo sapiens
  misc_feature (1)...(329): n = A,T,C or G
acaaccagaggcccctngggggcggngcacaaatgaaattcacgggtagaggaaaagacagaggacacactcctaagggaagaggcaataggagcagaacggaggaggggaaagagcagagcgtgaaaagtcaaggtttcggggccttttttggtaggaggcctgtgataaggttcttgactgaacaacctggccttctagagaaaaccttcccactgagacaactctcctgcgggagggtttcagagcagcggcctgcagaaaggaagagatgtcatccttgaatggatctaatcagagagggtgctggcctcagaggggggggggcc

SEQ ID NO: 2058 - DNA, 538 bp, Homo sapiens
ggatcctgtgttggcgagggtttggcccgcatggagctcttcctgttcttcaccactatcctgcaaaaattttccctaaaggctctggtggagccaaaggaccttgatatcaagcctgttactactgggcttttcaacttgccgccgccttacaagctgcgccttgttccaagataggagtttctccttttaatcattcaaatcaaagtaattgttctctttttttctataaacagtctattttgctaagtgctacctaggccagaaacatcactcactaacagcacgtgggcatttgtttccatcttaaaacctgggtcctgaaagctcccaggacacaggcagggtgtctcagttcctcagctgtctataaactaggccctaagcacaactgacaccagatccacaaggccctcatcagacgccacctgcaagcagctgcgtgctcttctgtggcttcagaaatagaattatattctggcactgtttcaatagagaaattaatgtaccagcccacacacattttcctattctcacg

SEQ ID NO: 2059 - DNA, 252 bp, Homo sapiens
  misc_feature (1)...(252): n = A,T,C or G
ctgcaccataaattcccagcatgccancgctggagatattggggtgnnnnggtnccagcancanccaggaagtgntncnnatnttctctactattacgcanaagaggaacactatcggcccnntgacntccccgacagattctaagntaccgnggatgcagcccacaacgcctgtatnctcaccatcanccccgtgctcccggaggatgatgccgattacttctgttccatcgcccacacctttgaacccta

SEQ ID NO: 2060 - DNA, 207 bp, Homo sapiens
cagcaccagaattaaagtgggcctctttcctgggtgacataattgcactttggtctggaggcccgagctgcttccagcagcagtaactcggtctgttaaggcagcgcctgcacagcctgcacactctgcactgccttctttccctgtgctccaggcctcaatgttccctttctgcaaaatggaatctatctataaagatatctgaaa

SEQ ID NO: 2061 - DNA, 419 bp, Homo sapiens
agtcttctatgagtgctggctcagtttcctcccacacgaggaccaggtcggcattggggacgtcagaggctgagatgctgcgggaagtgtacctggtgctctgggtcatccgcaaacaactaagagagctggcccgcaggcaggagaggcgaagacggcgccgtatgtggtctcatccctcccatacttcccgtcactctgaaccagtgcagggcctcaaacatgatgcccgaagtcctctttaggcaggggagccccagatcctttgaaagcccccacctcactcttacggaagattgacaggaagggttcaatggccatcaggccagagctactggtgaggagacattcgaccatactgccacatctcactggagccccaagaccaggcctggggtcgaacacacttcccttctctg

SEQ ID NO: 2062 - DNA, 231 bp, Homo sapiens
  misc_feature (1)...(231): n = A,T,C or G
ctggactgtgattctgcaggtcttttctnataagcaaanctttgcttttttanccaanataccatggacaggacnanatgggctnancgtttnccanaggtcctgantccaattcccagcatcccacatgggggctnacaaccatntgtaatggnangcgangcactnttnnggggngtgcttgaanacagctacagagtactnatataaataaaagtaaataaagaaaaa

SEQ ID NO: 2063 - DNA, 365 bp, Homo sapiens
ccaccctcctccctgcagagaggccccatgtgctttatgggaacacagtcctagaagaccctgctaagcaactccgtgggggaagtgcctgtcacccaggaggagttctaatggactgttctcttcaaccattgcaaagggtagaagaccctgctaagcaactccatgggggaagtgccttcacccaggaggagttctaatggactgttctcttcaaccattgcaaagggtcagatgagtatgggcttgggccctttaattcacaaacccagtagaaggcaaagggcaattctgccagagaaccacaaaacatgactgaggaagaggctcagtcagtaaatgtttgccttgtgagcttgaaaaaa

SEQ ID NO: 2064 - DNA, 432 bp, Homo sapiens
ggcatcaacagagagagaattcatttacctcacaagcaactgcaggatgaacctatctgatttgctcttttcttctatgtgacggcaaaacagagaggagataacattcaacaaagacagccaggaagcacagaaggacaaaagacaagtgcctggtggtagcagagtcatgagctactttcttacttcttagtttctgccactgactgccaaaatcacaatgcaagctgcatctacaagagtctctctgtccccactgtggctttgcagtgcaagatcaagccaggtagagatccacctgagacctggagaaggggcagccacactgtaggtgggcaggataggccctcagctaaccacacccatattatatctacccagaagttcttaccactgactcatagaccaaaggggtcaacttcagaataggat

SEQ ID NO: 2065 - DNA, 180 bp, Homo sapiens
gattgtcctactgagagttgctactgccgagccccagttccctgggagctgcaagccagaagaaagttccaaccagacttcatcaatctctggggtttctaaaaccatcttgacccttagcagtggctagacacagcattttccaagtaaagaaaagttgaaaaacctgaaaaaaaaaaa

SEQ ID NO: 2066 - DNA, 109 bp, Homo sapiens
gcctgttggatgggtcatctattttaatattggagcaacgtaaatggattgttaaaaagatgaacatttttccctcctcattaaaaatcttgaaatttaaaaaaaaaaa

SEQ ID NO: 2067 - DNA, 180 bp, Homo sapiens
  misc_feature (1)...(180): n = A,T,C or G
ccaaggatttggcctcnattgtcctggagttncaatgctgntgtganaataaaagcttntcaatgctggnacaatgntgaaaaanatggcctcctggctggatcacagctntnatatncatgctgatgtctgccatgacctctgtcctggaaataaaaagattttagtaacaaaaaaaaa

SEQ ID NO: 2068 - DNA, 376 bp, Homo sapiens
  misc_feature (1)...(376): n = A,T,C or G
acaactgaggttgggatggctaccagctggggcaagcatcttgcaggatgagaagcagctggaagaactggcaaagcaggccatagaccgggccctggccgagggcgtgttgctgaggtccgcacagcatcccagctcctccgacgtnngnncanttangncantctgncncnncccttcacnaanangnagggntctttnggnnnaagactntgntttnnttatanncttaacttacngngngntgntgtcngccaaaacccatgcttgntggagccacacntgtctaacaccatcaaaaaaggacgactatactgcccgtntctttgatatctacaaacaangtcctgaaagaaggcattgcccaaaccgtgtt

SEQ ID NO: 2069 - DNA, 452 bp, Homo sapiens
gtgagggaacaactgtcagaagaaacagagcaccatacctggtcgctcctcatgttcagtggtgacagagcgcagatgctcaagatgcaggaagagaacgacaagttctcggaggccctcagggagggcaccgagttccactccaccttgtaccacatgatgaaggacttcgcctcccccgtggcaatggagagggtcaggcattcgaactgccagttcatcgactcagtgtgctacatgctgctgtctatccgcgtcctcagctattcctagctattcctagcccttacagcgtgtgtaagcatggtggacccttataccgagaggaatcaggtatctttccagtcagccgctaaagtgatttaagagcaccaggcgttccagccacactgcacaaagatttgaatggtctttatttggatacatctcaataaagtctgatgcctctcact

SEQ ID NO: 2070 - DNA, 303 bp, Homo sapiens
  misc_feature (1)...(303): n = A,T,C or G
cgatcattgagtttttcaanagccttggctgngttaacactccattnaaccaggaaccanagcccccacatgatgatgatgcantgttgctgaagngcctggagacctttgacnatctgtaaagcaggagggccggagaaggaggagattaaatgggggaggggcgggttcaagtttgaataccagtagctagagttatactgccttgtctttcaagactcattgagaaaggctgcttccaaaagccttcttgatgttcttagtttctgttactataaagttttaagagcaatgaaaaaaaaa

SEQ ID NO: 2071 - DNA, 303 bp, Homo sapiens
  misc_feature (1)...(303): n = A,T,C or G
tactcgttcagcggaggccactggccttaggcggntgcctggccccagcaccatggntctgtctcctgttaccaccctcggtcctgaggtctgagcatctctcaagggtcccaggaggtccttggcccatgttcatctcttgcccaagccctcagcaagcactgcccaacaaccattgtccactgccatcctaccagagcctggctggatttgccctgcttccacctggtaaganggtnnaaaacccttngcntgtgcaaggnaaaaggcntaaacctccatgngcctggccttttgggttgt

SEQ ID NO: 2072 - DNA, 393 bp, Homo sapiens
  misc_feature (1)...(393): n = A,T,C or G
ggagcggggtgcgctggacgcaggagtgacccntccatngcncagaacaccaagtncatgcagactcaaagccccccatcagagtcttcgagaataggcnaacgtgaatnctatagcttcttntaatttttttttcttttagagactattttgattctttgacagtttcatgcgtgtatacaatgnactgtgannataacacccnattcttncacnnatctnannnacaggntcctgtggtgtagaccgatgaaatgcgcttagggccttgatggancttccttaatttttttaaacccgatgccgntatgccacttatgtataaaattagtgatgaggccactagtccgcctactggagtagaaaactttaatcccagagtaagtaaattcc

SEQ ID NO: 2073 - DNA, 360 bp, Homo sapiens
  misc_feature (1)...(360): n = A,T,C or G
gccagcccagcggccctgagtctgacaaagccttcatgtccaancnggagggcaataaggnagngaacagactccggcgctaccttggagcctcagtccccagcccagatcccctggagcccacccgggagcagtgtgagcttaaccctgcttgtgacgagctatcagaccagtatggcttgaagaccgcctacaaacgcatctacggtatcactatttaggacctgtgctgccctaaagccaaactctggcagctcggctttggctgctctccgggacttgatcctccctgtcctctctctctgccctgcaagtatggatgtcacagcagctccaaaataaagttcagatgaggaaaaa

SEQ ID NO: 2074 - DNA, 325 bp, Homo sapiens
gctgtcaaggagcctggatcccaggagcgacctgctgtatagaggctggcctgggccatagaaacccaggagaggagtcaacagttgtgtttcaccccacctcttgatctgattttctcacagaaagccaggcaggatctgctacttaggagtctttagtcccacatggagtcctcagagcttcaggggctcagtgctaaccgttcaacctactcaaggcattttagtaggaggggctggggcttaacgtggtgtttgatcgcttcacttgcacttgtagaggacctgggttcactttatcttacaataaatgaatgaataaata

SEQ ID NO: 2075 - DNA, 426 bp, Homo sapiens
gggaagctcattaggcatccgaaagttctaaaaggaggctccttgagattcaggaactaaaggactcccaagtctcaggaagttcctggaaccgaccagaacatacacaaagaagactcttctttcttcaagattatacagcagtaaagattgctgagagactctccaaattgagctgcctggaagggtacaaactcattgaggtgcccagaagaaagactaagattagttgagctgcccagaagacatattcccaatctgtccagctggccccaggctatgcaatgagctcagcttttgtgagttgttatctatattgggatggacgttcagttcagttaccttggagtaatcatgctctttcaagtaatcccctacccattttcctggggagtaacccaataaatccattgtttcaccatgctg

SEQ ID NO: 2076 - DNA, 139 bp, Homo sapiens
  misc_feature (1)...(139): n = A,T,C or G
gggattcaaacgggagccggtttggactgactggatgccttcctcctcctccccctnctcccccttctgcttcagatntatttattatatagtaagaacactgaagcaggngtaggacacactagacgagggcaccaga

SEQ ID NO: 2077 - DNA, 318 bp, Homo sapiens
  misc_feature (1)...(318): n = A,T,C or G
gacggcttttatacagtganatcggaagcgngtaacangagacaaatacatgagacgcactnatgatctatttnnnctntnancctttgcgacatggattntcactgagcaaaaccaanaccaaccagaatgacgatntnattatatgaatgtgacggtctctgtctccccacctncatgtggaacaatgnattcangatacttagngtaccacgtttaaatgaccaggtctcaggataaagagntttacagaaaatttaaaatgcctggnaaagactcttgggntcctgttcccctttcctcattaacttcgaaagg

SEQ ID NO: 2078 - DNA, 219 bp, Homo sapiens
  misc_feature (1)...(219): n = A,T,C or G
gcatgctactggaaaatgttttggggagggctgnaatgacctgnctggacattgtcgccgaggtatgatcactgttacccgaaggggtcttttcatgggtggaggctggnnctacctntgtacttgaccctaacnatangangccannacntgnnncccancggactnccnncgggtcncagncgggcttgntctccctgaccagaaacccacctctca

SEQ ID NO: 2079 - DNA, 102 bp, Homo sapiens
  misc_feature (1)...(102): n = A,T,C or G
gacacccaggattcagcanacatccaagatatggaggagacactagatgtgaattcttatgcagngaattaaacaatatgttattacacaaggaaaaaaaaa

SEQ ID NO: 2080 - DNA, 131 bp, Homo sapiens
  misc_feature (1)...(131): n = A,T,C or G
ggtagaaagaatccagagggtaatgggccatgtctccctcaagagaagangtctacattataaactcccttttcaaccccaacacccactatatatttttaatatatagaaaaaaaagctaaaaaaaaaaa

SEQ ID NO: 2081 - DNA, 189 bp, Homo sapiens
  misc_feature (1)...(189): n = A,T,C or G
aatcaaatatgcattgatacatatagcataacaaatatatatgattttttttcatactcaacaaatgggtaaactgagtctcacagtagtaaaatgacttatttatgacacattggtagcagacactgaagttnaacctgagcctttctatactttctcaatgacctgctatactgatttcattcttct

SEQ ID NO: 2082 - DNA, 185 bp, Homo sapiens
  misc_feature (1)...(185): n = A,T,C or G
ggagcctaggactgctccatngggcaacacacaaactatnggcatnatgnctntaattncatggccgctncantgcactngggatgcttcattgtaaactgggtgtgttaactgattctttattgctcactctgtcccatctgagccaagccagctgttggcaattaaaacccacttgcaacctt

SEQ ID NO: 2083 - DNA, 374 bp, Homo sapiens
  misc_feature (1)...(374): n = A,T,C or G
tgactgatgccatcgcctagatnataaagcgcccgtcactcaagcacagaagtnnaaatggacacgttcattactttactgatgtacgatcnntcnctgacgtannacctcaaagaggnaaggctttgngcatatgcanaaacggggagaaaaaaataatctctccgagtcagaagcctcgggggagcatagcaagacttatcaaagttacagtgctccatttggaaagcgccaaccgccagccctcgggcgaggtgcagtggtgcataattaatgnagtcccagacacaggtcactgaagtgcccacaggtgtgtgcctgggtttcaataanggcctttccttggaactccttttcggattttgagttgggcc

SEQ ID NO: 2084 - DNA, 161 bp, Homo sapiens
agcgttcctaatcccacctgactgagaagagtgaccagcggacctaaggctctcttctggcctacatagacgcctgctctcacatgcaaaaaaaagcccacccctacatgtctaaacacaaataaaatcatttataaacaatataaataaaataaacaaaa

SEQ ID NO: 2085 - DNA, 188 bp, Homo sapiens
ggtaagtctcgaaattcgatatcaagctgatccggaacccttaatataacttcgtataatgtatgctatacgaagttattaggtccctcaggctcatggcaggccacccacctctgcctctggagtgctgctattaaaggcaggagcaccgtcatactcagctcctaagcttcatttaaaaaaaaaaa

SEQ ID NO: 2086 - DNA, 414 bp, Homo sapiens
  misc_feature (1)...(414): n = A,T,C or G
ggacaatgaactgccggatgctgcccgacctttgcantgncctcnatanctggnacgggccanaccaacgctattttctgggnttaggggatangactacngngtnagggnttagcaaacggatggaacatgtgtggaagatggtacgctatccaggccanancntntncantgtcagcccggctcactacgcccgtcgcctctgtcggtgggcagaggtgcacacagaatgactcacgtgtctgccttcttcccttatggacaatgcgccggcaactattctgcagctgtacccagggagctagcctgcagttcatcctaccagccaccagagggaagcaccctcataactaatgctgtgaagactcaaccccattcggtgacggtgctgtaccctgcatagaacaaggaccc

SEQ ID NO: 2087 - DNA, 210 bp, Homo sapiens
  misc_feature (1)...(210): n = A,T,C or G
caggggaaacaccctcttnctacttacactngtctcgcccaccccccattctctccttggtttnttggccctttactgtggctgtacttcanatnatnaaagcaagagaaagaatgtgctgagtgntntcttccctgngccttaagggccctnatcccagcagcccatatagccagcaaatggaggactcctaacttcagcacaagtggg

SEQ ID NO: 2088 - DNA, 346 bp, Homo sapiens
  misc_feature (1)...(346): n = A,T,C or G
ggttagcgtatgcctacgccctagcgtagagagtgacgatgtcccttgaacagcaacctcgccagcacgtctnctagagcacgtggatgggagngcacgagcagcagcagntgctaccatctatcgtgacatagtgtactcacgaagaatgtgatgtgccgagctgcgagaacacttcngcgcttgcaccnttcgcccctgtcctctagataaanctgcgtngtccnnnaaancgatacccatntgagaaccattngattaatagataaagcaaagacagtntctgaaaaggaaaagttcgaagatgngccccntcacatcacgaacatttatgaagatagcccag

SEQ ID NO: 2089 - DNA, 372 bp, Homo sapiens
ggatgaccggcttcaactccggaggaaataacactactacctccaacgggtccccctcctccaattccggtcgcccagatttccgaaagtattaactcagcctggcgtcccttccctggccttcagcagccacaggaggagagctgatgtcgcctgtaggatgagaggactgcaggatgtgatgcccagtcccattgtcccccccaggacccatggctctgacaagccctgagggtgggcccttccccatctcttctgattggaatctttcttctccctaccccattctctctattctttggcttctcagtgtctctacaacaaagaatagatgattcaataaagtttcttgattttctgcaaaaaaaaaaa

SEQ ID NO: 2090 - DNA, 373 bp, Homo sapiens
  misc_feature (1)...(373): n = A,T,C or G
ggaattaccgtcccccagctccgtggccagcagtgactcaggaagtacagacgaaatccaggaagacctggagcgggaggcggatgtggagcccatggtcagctgatgacggaggcccgacgctcctggtggtcttggtgatggggtccagcctcctctccccactgagccgtgtgggctccactcctcgacacagacttctgtcctcccttctccggaggcccagcgggaccgctgcttccttccttcctccaccaccgncccatggaatggtgctgtcgatttttctattgtccccacncacaccncaaacgcntacttttgngcgtccatgcagtgcaactgtgccttctcccttaagctgagccacttt

SEQ ID NO: 2091 - DNA, 192 bp, Homo sapiens
  misc_feature (1)...(192): n = A,T,C or G
aggagacccatgaagttccctgttctctgaggaggaaacatctcatgtctcctgatgcctgctcttcagtttctgtctagctgagacaccacaaatgattgccctcttcgttttgaattgctataaaagcatgcctgggtctgagtaatttataataaaatgccnaatgtatttggctcatgaaaaaaaaaa

SEQ ID NO: 2092 - DNA, 109 bp, Homo sapiens
  misc_feature (1)...(109): n = A,T,C or G
tagaaattgaactctggaagagagggttcccagactgccttttgagaataaaatgggaggccanaaccaaagtcttttgaataaagcaccacaactctaaaaaaaaaaa

SEQ ID NO: 2093 - DNA, 347 bp, Homo sapiens
  misc_feature (1)...(347): n = A,T,C or G
aaagatgaaggcagagatcaggagggaaaaganctttggaggggaactgcgcatctccttccaggagcccggaggggagagacagctgctcagcagcaggaagaccctagcagattatgggatattctctaaggtgaacattcaagtgctggagacctttcctcctgagatcctggtctttgtgaagtatcctggtggccagagcaagcctttcaccatcgaccctgatgataccatcttagatctgaaagagaagatagaagatgctggaggcccttgtgcggaggatcaggtactactgttggatgatgaggagttggaagangatganagccttaaagagcttg

SEQ ID NO: 2094 - DNA, 166 bp, Homo sapiens
  misc_feature (1)...(166): n = A,T,C or G
aaggactgcggaggcnaacnctttgctgtgttcaaatccaagtcaagggtacaaaaatgcanagcaataaagcctttaacttgganaagcaaaatcatactccaagggaagcgtcatgcaacatcaccttatnaaaatacntttgaagccttttcaaaaaaaaaaa

SEQ ID NO: 2095 - DNA, 375 bp, Homo sapiens
  misc_feature (1)...(375): n = A,T,C or G
agacctgaacactccagctcancctcacttccaagcagttgcacacggagtccctattcatccaacggctttctatactgttttccagaagtgggaaaccctcggcattacgcgtagtgggggcgttgggaccttaaaactgacgtgaatctacnattcccagtagcaaggcaaaacaccagaggacgtgaatatgancctaccgtctngctcgctcggagactcaatgcccagggacttcaagcctgcaaggactangaaatggaaagcatcggctacaagtgccgncctccccattacccttnctctccggncccaaggaggcgtgtactaagtgaaaggactcggcttatagatcccacccatttggcgagc

SEQ ID NO: 2096 - DNA, 123 bp, Homo sapiens
  misc_feature (1)...(123): n = A,T,C or G
aattttgtcagaagcactggagactttagccactgagcttnatgaactagaacgatccctggttgaaggatncccgcctgtcagcatccttagtgaggaggagttctatgatgcactgtcagg

SEQ ID NO: 2097 - DNA, 192 bp, Homo sapiens
gatggacaacgaaagctgaggaaggagatgtacaagggctggagaggggctgtcgtacagccactggatgaaggaaggctcccgctcccatcctgagctgaaaaggaaaaggagcatcaaagatccaaagcctcgcgtttggtttttatttttattaaaaacctcctgattttctccactgaaaaaaaaaaa

SEQ ID NO: 2098 - DNA, 338 bp, Homo sapiens
aaggccagacccagacaccacacccagcaatggatacaggacatcacacccagcaatggatacaggacatcacacccagcaatggatacaggaccttggagaaattaggagttgtaagcaggacctaggcctgcttgattctttcccacctaagtgaggttctggagagggagcccttccacccttccagacccagcaaaagggcaagatgggagcaagaagcagagggtagacgggcagagctaggaagacagcccccaaaagaactgtgggggaaataaatcggatgcccttgggtggcagcaacaataaatcgtacagcagtgacaaaaaaaaaa

SEQ ID NO: 2099 - DNA, 469 bp, Homo sapiens
ggctccaccagcttctcggatggagccagcgcccgtatccatgctatccgactgcaaagagagtcgtggacgtgaaaagaaaaggcacaacaagggagagagaacctgcgccccgcgatgggcgctgggccgtgccgccacctaccgagtccgagacgaagcctcgggtttgcaggaccttcataccccagacaccgaaccgagcccgaactgccaacgccgagcctgccattgtcttcggcgttgctcagctcgcgttgcgggcgtggctgcttctctcctagcgcgctaactgcgagggcggctgaactgccaatctagacgccggggaggtgggacgagcacggaaaccgcgaatcaggagggagggggcggggcttatgatatctgcagcgtttgttgagagggaggcggatttatccttagttaacaagtaataaacaaggctctacgcatcatgacccagagt

SEQ ID NO: 2100 - DNA, 397 bp, Homo sapiens
  misc_feature (1)...(397): n = A,T,C or G
ctgccgaagaagagtgaatgagaaaagaacaggccaaagctgctgcaggaaggtgccggcccaggagacctccatcatcacccggctgtttgaaggacagctcagttacagcatcacatgtttaaagtgtgagagctgcacgcacaagaacgaagttttcaccatcctctccctccccatcccatctgactatgaatgttccctccaggaanggagcccccagctnctgaatatanntncttggnnntgagatgtgnngggaggggngnncttttgtgaaatnaagcaagaggcanctgngaggaccacgatttccaaggtgccgaaaataattgtttttcactttaaaaggnttgacatccagggcacanttnagangaaggttcggcagacattc

SEQ ID NO: 2101 - DNA, 266 bp, Homo sapiens
  misc_feature (1)...(266): n = A,T,C or G
gggaaggagaagaggcggaagcagccaaggagctgctgctgaatctacagtccacgggccttcatctcctctcaggggcctgccaatgtgtcccactctgccagggaagaactcgacaataccccctcagaggctgttttgttagattaaagttggatttgactgtgganngcgganttggaaganttggaccatgtgacccagaactanaatgtaattactactgttcagttaattgctttaattttctgggctggggggggcgg

SEQ ID NO: 2102 - DNA, 358 bp, Homo sapiens
ggtgagggcccgactgctcacctgtgtggaggggatggatttgtccctgttagagaaagccatcttggagcagaggcgtcacctgcagaagaggcagcagccaataggagacgccagcaccttgcaaacccctacacctgctcctcaatcgattcccagtgacagccttagtctggaaccagagaacagggggcagcaggtgccccttccccaaactctggactgagcagaaagcccacccaatctggccgtagtggcccatgctgcaatcccagtgcaggcagggagaggcgggaagaggtggagtttaaagccagtctgagctacataacacatatgccctctctctctcaaagaa

SEQ ID NO: 2103 - DNA, 219 bp, Homo sapiens
gattgattggacccaggaccttcccacggctacagaggggctctagtaccaagctacatctgcaccccaatccaccgttaacagctctacaaaagaacccagctgcctaagctctcttcaggtttcagttctcactctaaccctgtggctctgctccttgcctctctgctcctttcaataaattcagtcctagtttgttaatttactgaaaaaaaaaaa

SEQ ID NO: 2104 - DNA, 164 bp, Homo sapiens
  misc_feature (1)...(164): n = A,T,C or G
gaacgcctggttccgtttaatgaagtgcgattaccaccnccncctgatatnatgtaaggcagctganaagcttncctgggntctctggaagcncancangngctcttaaccatngagccntctctccatctcaaaccacccatgtatataaaatgaaaatacat

SEQ ID NO: 2105 - DNA, 349 bp, Homo sapiens
  misc_feature (1)...(349): n = A,T,C or G
ctgaggtatgggagttttgcctggataagacagaagatggtggcggatcccccggaagtgatgttacagacacttgtgagcctccatgtggatgctgggagttgaatccgaattccctggaagaggagcacgtgctgttcactgctgatccgtacctggagctccacaacgatgacacacgagttgtgagagtgaaggttatagctggcataggcctggccaagaaagacatcttgggagccaggtaaataacaatgcatgagcttggggtttaaggaaacagtattgcttantttctttcttgaactttgattaaatgaaaatctgagtgatagtagcaaaaaaaaaa

SEQ ID NO: 2106 - DNA, 258 bp, Homo sapiens
  misc_feature (1)...(258): n = A,T,C or G
tcagaaaacttcctgaactggnacgtcatcactgatatgttcaaaaatgcatttcctttcattaactgggacttcttccctaagnnnaaaggactgagangngccgatnntgatnccnagcgaccattctntntaagacctangaccnannctgagcccnntggancaggaggcnngcgaaggaanctgaagtccatcctacgacaaatctcccctgcctcagttcccccaataaagtgttttccactcaaaaaaaaa

SEQ ID NO: 2107 - DNA, 310 bp, Homo sapiens
  misc_feature (1)...(310): n = A,T,C or G
ggtgtccgccgatgccttagaagtggagttaagagttgtgagctgccgntttttggctntgggactcgaantctgttcacctnngatnntatcngncnccaagncatatacttgagccccagcnacatanagacttcagtgagaaccagagagatggtgccaggcctgccaacctgagttcaatagcagaacccacacagtagcaaaagaaccaactctgacctcccctctccccctcccctctccttcccctctccagtagtcactccagagacacccaaaataaaaaatttaaatgtaaaaaaaaaaa

SEQ ID NO: 2108 - DNA, 240 bp, Homo sapiens
aagcccaatgtaaggttccagatggcccacttatttggagacaccatttaacacggttctgcttctacttccatgagaacctagtgaagaagacacagccagagctttgatcaaagattccaaatgcaaatacaactaaccacccaactggtcccatcagccaatgtatctctttgttacctcaagggagattgatttacgctttcatcaataaatcttcatattttcaaagaaaaaaaa

SEQ ID NO: 2109 - DNA, 273 bp, Homo sapiens
tatggacgaaaagatggatgttttaattaataatcaagaagaacaacaagcttccctttcaaaaccaagccaaggagcagcagaaattctggcagctaggaaagatggacaaaggctcccaagccatgatcacagaagaacccgatggagcaccattggcttgtgacaagaatgtggtgccaccaaaaccaacgaggaatccactggagtccctccatccatgtcagagttgctgcgagaaatgtttgttgtgtgccctaaagaccaaccgca

SEQ ID NO: 2110 - DNA, 131 bp, Homo sapiens
  misc_feature (1)...(131): n = A,T,C or G
acttcttgaaccaggattccggaagaaatggagacctttccntacatnttgtgagcancaaaaggannagnntggnacgtgtntataaatgacgttgaantaaacaggntgttttttgtcaaaaaaaaaaa

SEQ ID NO: 2111 - DNA, 276 bp, Homo sapiens
  misc_feature (1)...(276): n = A,T,C or G
tgtatagctgacactctgnataacacntggtagctatctgctggagaagtcgcgagtgatcttccagctgcccggtgagcgtggttaccatgtctactaccagatcctctcagggaagaagccggagctgcagggtgagggtcaggatgggaggtcagatcccaaagacactgcctggctctgggatgggtgttcaccctctctgcagaggcgtggggcacctccactctcctggnaacacacagctgtttgtcccaccctttttcttcctactgc

SEQ ID NO: 2112 - DNA, 305 bp, Homo sapiens
  misc_feature (1)...(305): n = A,T,C or G
aggcctgggcctgaantctcanagccccaagctgtgcggntncacgagactnagntcttcctanatcaantgncttggctncttcatgngcaaacgcaaacgcanaactgccanagaagacagtanacgctatncctcctgaagctnccaagggagtncctgcctgccagngccaccagatgacagtncaccatggaggatnttnctcagatctccgtnctcatcagtcacctgctgggcagntgcctcttanattcctgtctgcannncagacagtcgncantatgcacactttaccccagcag

SEQ ID NO: 2113 - DNA, 281 bp, Homo sapiens
  misc_feature (1)...(281): n = A,T,C or G
cagcgccatcggccgacccggcgcgcccccacgcgtgcccggactgcggccgcgcctttgcgcgccgctccacactagccaaacatgcgcgcacgcacacgggcgagcgtcccttngcgtgcacggaatgcggccggngcttctngcacaatnnnattctgaccanacacggacngncnnanncantccaanaaaagggactatggcccggaatgcgacaagcgctnctccgncgcctnnaacctgcggcagntccggcggngtnacaccgtagagaagcc

SEQ ID NO: 2114 - DNA, 140 bp, Homo sapiens
  misc_feature (1)...(140): n = A,T,C or G
gacccccggtccaatcgacaacactaaaantgcggttactaaatgnggcagtgtgatgctcaagcaaggagcanactctggtcaaatttcagaagaaacatggaatttcctgcagtctatatatggtggggggcctgaag

SEQ ID NO: 2115 - DNA, 148 bp, Homo sapiens
accctgaggtacgacggcgaagctccaaacgagagagacgatgaacacgtcattaacttctattgtgaaagctttggggggaaaaaacattttttgtctaaatatgaggctaaataaagccttggatgcacaaaccagaaaaaaaaaa

SEQ ID NO: 2116 - DNA, 474 bp, Homo sapiens
  misc_feature (1)...(474): n = A,T,C or G
gacagcaaccctgctctgagactgcagcccaggctacccattctttctttctccatccttcccttgattctgctgcagaccctctggtagctgggcttcctcagggtcctttgtcctctccaccacacccagactgatttgcagcctgtggtgggagagaactcgccagcctgtggaagaagacccagcgtgctacacagcaacccggaaccaaccaggcattccgcagcacatcccgtctgctccagaagaggtcttagaagtgagggctgtgacccttccgatcctgagcggctagttttcaaacctcccttgcccctgcttccttccggctcaggctgctcctccttaggactttgtgggtccagttttgccttctgttctgatggtgattagcgtctcacctncagcgcttcttcctgtttcccaggaccacccagaggctaaggaatcaagcattccctgttgccttct

SEQ ID NO: 2117 - DNA, 393 bp, Homo sapiens
  misc_feature (1)...(393): n = A,T,C or G
gaactgaggttggctacncagagcgatatgaaaacagacaaggagcaggactcatccatcaacctgatccgntgctcctanctgggcagcggggacagnagncaagtcacttctgaggaacagattccctacacagtgnnttccacatnacaganaaatatantgcagagctactnangacacagagaaagcctggctacccaacagccccccaagaaacagnccantgccaccgnccgaggcctcaganagcttancacacangccgatccacatccattatcatgccttaatcgnatacgagngngctgaacaanncccataccatcnttctggacttttccatggggcactatgtggataatcnggctntggttatactaaggcaggacc

SEQ ID NO: 2118 - DNA, 198 bp, Homo sapiens
  misc_feature (1)...(198): n = A,T,C or G
agatgatgacgaacatgagtggattgtcaggacctgccgcaagggctggttgccaatgcccaaacangaagtcctagccatgagcacctcggcctcagcatctcaccagggacttccttctgcccactgctggcctgggaaactggctgtagtcctagcttcgacttaagtttcagaataaaggttttctgcactgaa

SEQ ID NO: 2119 - DNA, 431 bp, Homo sapiens
  misc_feature (1)...(431): n = A,T,C or G
tatttgcggcccgacttggctgcagtccgtctggagagagaggctgtgagcccagctgccgcacctatgggcagaccttcgccaacgccacagatctgtgtcactctgctttgggtcacgtcctgcgggtagcanntcctggttncagncnctgcctcaacgnctncatctnctctacaggagcccgccgccgccctngtgcctgnatttnaaatgttgtatgcnntggcngcggcagcggcancggcnacagcccngagccaatgtttggctttcaatacgtgtcccttccctaggccagtgagccacccagaagtcatctacctctcttcctntatccttccttcctaaaccaggccctnccacctgtnttcctagaaatgatctaaccctcacttattttgcttncccaaaataaagttgccagccta

SEQ ID NO: 2120 - DNA, 483 bp, Homo sapiens
  misc_feature (1)...(483): n = A,T,C or G
atatcgcacatgctaagcaatccgtctcttgaggaacatcgcttcaagttctgaacttcctgtcagggtctcctgcagtgcaagctggcctcgcactcgctgtagagctaatgctggcctagaattcctgaccctcctgccttttacttactccaaggaactgagaatatggacctgaacctggatttacgtttgctctatgagtggttgaacccggcaccagaacatgccaggcagtgctccaccactgagttacgtgcttacactaggcttttacccttgcaaagatggttgctatggacatttatatatgtgattggcttacgtggtatggtaaaatagtcttatattttgcagatttggttattcgttgnttattcatttaggtctttaaccatctggagtttattttggtgnaattttttttttaacattttggagcttttggntttattatctaaaataaaaggtattcattcatgc

SEQ ID NO: 2121 - DNA, 413 bp, Homo sapiens
gagagacctatgcattgcttatatgctggtgacattgacttatctctatattggtatcctggtttttgcctcattcccttcgcctccattacccaaagattgtattgaacagaacttcttagacaacttccccagcagtgacatcctgtccttcattgcaaggatattcctgctgttccagatgatgactgtatatccgctcttaggctacttggctcgtgtccagctcttgggccatatcttcggtgacatttatcctagcattttccatgtgctgattcttaacttagttattgtgggagctggagtgaccatggcctgtttctacccaaacataggagggatcataaggtattcgggagcagcatgcggcctggctttcgtgttcatatacccgtctctcatctatataa

SEQ ID NO: 2122 - DNA, 223 bp, Homo sapiens
  misc_feature (1)...(223): n = A,T,C or G
ccctgtttgaatacccgagntagatngactgccaagaagaagcggctgtctctggagcagggaggagcagagctaggacacaacgttacccataagcatgaaccacttccaacgctttccccactccaggcagacactggagccattaagcaataactccccaaccttcccctccagatctggatgcttctaaactactttctgtctatgatgaaaaaaaaaa

SEQ ID NO: 2123 - DNA, 435 bp, Homo sapiens
  misc_feature (1)...(435): n = A,T,C or G
tcactggcctgtttggaacagagcagcaaggcaccagccctgccctcagtactgcgaaccacaccagagagctcggttttcctaggtggaaactaccaagtcctgttacacaagttaatgccccatcttctaaatgggcacggtttctcctggcacctggaaatagtcctcaagtggatgagaaaccaagtcctctgcaggaggccaccatgctagctgacctggcacaagggactgttgagaacaagactccagtggaaggccacttcagcagagcccctgccattaggcctcctcaagccattcacactaccaccccacaactggacagacctgacaggaagacccgagagcagccaagggacatggggactcctcgagcagatggtaggcctttngctcaagggacccnagaaaggttcaacctttgcactg

SEQ ID NO: 2124 - DNA, 385 bp, Homo sapiens
gtccttaaagagaatggataaagtgacacaatattgaagaagaaagaggggttcactcaacagagcccccagggaggctagaaaaagctcaagcaagtttgtctttgtttttcttcttcttctttctgacatataaaacccactgttggtgttaacctgggcaaagagctgtactgcaacaaagaagcgcaagcttttcagttgtctctcgaaaacaagaccaggaaggggccttcccaaagcatcagtccgtagaaaagttactttctgctttaaaatggggttcattcaaagatgacccaagtacaacagtatctacagaggtcattcccctgcccccaattttcttttgtacatccaagaataaacaacattaaaaaaaaaa

SEQ ID NO: 2125 - DNA, 299 bp, Homo sapiens
gcttgaagagaaatcgggacggctgcagacacaggagcctttgcccacaggatctgaacaactggctaacggaagcaaccccacggcagcagaagataaacacaccaggagtccacaatgagctggaggagactctttcagaaagaaaccaacattccctggctcaccggaactcctgatggcaaaactgacctatcacaatggtcacctgtttatccagaacccctgactagcggctttggccttagcgatactttcattctgcgtggatctgcttttgtggagtgggaagggtaatg

SEQ ID NO: 2126 - DNA, 421 bp, Homo sapiens
  misc_feature (1)...(421): n = A,T,C or G
gagatttccagaaatatnntgactcacgagaacgtaacagaaaacctggagagtccagtgctaaagtccaaactggaggagctacctgaagccccaactacaaatggttcaacaaagacacatctgaagatgcgagtgaaggcgagaccccctggacagatcaggggaatggtgcatacagatgagatgtaagccaatcacacaagacaccacacaggcttccctatcaccttttatcatgtggcagggcacctcaaatgcttgtcatacatttgngatttcatttcttctttgtggtaaggtcaaagggaaacaagttttaacttggaaataaacttcctagctcaaattctaangcnaganatacattagngantncatttcttctttgtggtaaggtcaaagggaaacaagttttaac

SEQ ID NO: 2127 - DNA, 246 bp, Homo sapiens
  misc_feature (1)...(246): n = A,T,C or G
gacaagatcctgaccatcancgagagacctgganggaggcacgnnncacncatcagcttnnagaccgaagggtgacacagcggccntancatnatgcccgnatgacattatntttnttgcaaaggataanctgtaccctacnttccatanngagcatgacannttcntnttcgcgtacnccattnctttgggcagggaccttacctgctgcactgtggaggagaatactcttgttgaccggatgct

SEQ ID NO: 2128 - DNA, 346 bp, Homo sapiens
  misc_feature (1)...(346): n = A,T,C or G
gctctcttcctcaggccgngagacctacccggggaggcctttctttcacacccagcccaggagcacgcccggcttgatcccccgacctccagctgctcagcctgtgcacggcaggatagactggtcttccaagtacccatcccggcggtgactgtcccggccacgggccgtgctcctcagctggctccattgtacccgcacaaccacgaggcggtgtaaaacaacccacacttacagctgttctgaactaatacatttcaatatttcttttaaattttttttaaaacattgatttgaatgcaataccctctttttgnataaaattattttattctaaaaaaaaaaa

SEQ ID NO: 2129 - DNA, 206 bp, Homo sapiens
  misc_feature (1)...(206): n = A,T,C or G
tgggtctccgaggaatctcaggccgtcagctaccatcatgtatacagatgttccatgaggaggtttgcttggatcccacggcccagcattcctgttcagcctcattctccctctgatccagcatcgtttctgagacctgtctcccaggtggcatttctcttctnttctgncttggnttccgatccttaagtaaccaagtgactaat

SEQ ID NO: 2130 - DNA, 404 bp, Homo sapiens
  misc_feature (1)...(404): n = A,T,C or G
atatttgccccctgcctctgggaggacgtcttgatggccgccaggctgtgcttgtcagatgctgaggaagcactgttgggggcccctggtctcagaagttttgtcagcctgacttctcgagagataccaccagaagaactatgtctaccttggtgtttctcccanaatgaatgctgcgtcccccagttccaggccgtgcactttcctttgaacatccgtctgcatcctacatccctgcccctctgcccacatgccgctccttcctgtttagcttggatagcaggctggctctggccatcagaaccattgctgaccttggctgtcttcacctgctgggcagacacaaagtgaggccaacatctggacccagaggagaaattagaggccatttgtggaagcactca

SEQ ID NO: 2131 - DNA, 232 bp, Homo sapiens
  misc_feature (1)...(232): n = A,T,C or G
ggccaaggaatatgccatgaaagccctcagcctagctgagacatacgtcagtgaggaggaacaaaggtttattcaagagttgctgagtgtcatctcagccgaggagaagcagccctagagagcgcctgcctcgctggtgctgccaggggtgggggagggggagtgccattatgctgactgggcatcctctgtactgtttgtgaagtcnatagtaaaatcctgtttcaatttt

SEQ ID NO: 2132 - DNA, 477 bp, Homo sapiens
  misc_feature (1)...(477): n = A,T,C or G
agacaaactatgctatatgttctcttctgcgcactgaaagcacttntgacagacagcctttgagcagagctccagctccctgcccacagatacctaaactgactcggtgacattccttcctcattaatctccctccatcaattgggaaaagaagtcagcaggatgaaacttcgaaacttttctagtnttttctacctctttctctccccctttggaaagcctgctggaatttcgactgggatgttttccaggctcctggctgtagagacctcagctcgctaaaaccacagttgtttgtgtgctgccgcccacaggaggctacaatgatgaaaacccagaatggcctgctttcattccctcacccctgaggaatccngagaccagcagaaggatgtgccagggggcacatctagcttcccaaccttntggcttcatttttaaggagaagatgaaanancctggtaaatgcttcctggc

SEQ ID NO: 2133 - DNA, 196 bp, Homo sapiens
ggtgacttagagcctatagaagatggattcaatcttcataagcatgaatgttggccagccccagaaattttcttctgaatccacagagcatgtgcttggctacttccttgccccagaatagcattcttagaagacaaagattacataatgtggtgacaatgtctaaaataaactatcctcagcatcaaaaaaaaaa

SEQ ID NO: 2134 - DNA, 339 bp, Homo sapiens
  misc_feature (1)...(339): n = A,T,C or G
cttctgccagctgagcncgctgggaatggcangaattntctnncatcactcgcctttgntacagntctccggggctttggggccttttggcttctgcccttgactctccctggccttgactgnggctgctctgcattcctgggcagggctggagcttctaattgggagctggcacctgaggcctatctgcnaactggccacagactagctttgtccccggctgcctctgactctccagggatagatcattctctgaaaactcactctgcaggatccgtcttccaagatccgtctccaagatccggaacctgaagccagaatgtctggcagggctaactt

SEQ ID NO: 2135 - DNA, 267 bp, Homo sapiens
gagatgcctgccttcctgtgccgaggacacagagataaaaattcacgaaagaactcactccccactcctgccttgtaaatttcaccaaggacacccggaagagaagaactctttccaactcctcccaactctttcaactcttcagctagctgttaaaagccccctactgtcaccgcttgggggtcgaactcccctgccctgcatggcggagggacttcgtcctcagctagctgataataaaacctcttgcagtttgaaaaaaaaaaa

SEQ ID NO: 2136 - DNA, 385 bp, Homo sapiens
  misc_feature (1)...(385): n = A,T,C or G
gtttccttcaatgccgtatgttcctgcctccatggcttctcaggaactctcatgcacaacctaggncgactaccactactacngttaccaccaacancactaccacgattacaagcggnttcaacctgnatgtgagaccacctgcatcaccttggctgaataacactggcttgatcaatgtggcttctatgccttctaccatgactgtgaactcaatagtaactcctgtgatgacatatggacctctggagagtatggcnaacaattggnactatcagctacaagaacnngnntaacactatttttatcaggccaaccaattcaaatctttgggaaccangccctgatttgantctngnaatgagatttgctcctttagtatcca

SEQ ID NO: 2137 - DNA, 274 bp, Homo sapiens
gattaatgtgcagctgtcctcctgggtggaagagattcctctgagcttggatgtgtactcacaaagggacattgaccaagaagctcttcaacaaatccatttatataaggttctctagcaccaaagcaacctagtgataccttaacccatatgctttgtatattcccttgcaaacatgaccgtgtgccagtaactagttctgtgtgactatgcatatgcagtagtcgtatgtggatataaataaactatgataagataactaaaatataaaaaa

SEQ ID NO: 2138 - DNA, 287 bp, Homo sapiens
  misc_feature (1)...(287): n = A,T,C or G
ctggagaactatgaggctgcangaatgtaacaacgtccccagagttgctgngaccttgtccctccatctaccggacaatgaagtacagtggtccaggctagcccaccttcctgggctgtctcatggggacttggatgangcacccagatcccagcaatcaagataacngttcaaggactttgggaatagagacaaaagcattaagaagttcaaggatagccttggctacatgtttaaccggggctacttgggactctgcctcaaacaaaacaacaaaacaaaacaaa

SEQ ID NO: 2139 - DNA, 299 bp, Homo sapiens
  misc_feature (1)...(299): n = A,T,C or G
atgctgtcctcataaatttnatgganaggccnaggaggaactacttaacatcttctggctgacaagagctnacggtgatganaatgctttttctgtgatccactacgtcctacaaacgtgagattnanagctagcaagagggctgacaacctgagttcaagccctgggactcacatggnggaaagagagagcgaacttntggnacctatcttntgagatcccccgtgcatgctgagacacagtcctctcccctttccccagataatanttgagatattaaaaatttaaaaaagcaaaaa

SEQ ID NO: 2140 - DNA, 146 bp, Homo sapiens
gggccctgtgatgcatatcttctttattaccttcagttgaagatgtctgcaaacccttggaatgcgccctaagttttagaagtctgctgttatctcagaagcaattaagcagtcccattataaaaggtctttgcacaaaaaaaaaa

SEQ ID NO: 2141 - DNA, 512 bp, Homo sapiens
  misc_feature (1)...(512): n = A,T,C or G
tttgaagacctttctaactccagcggggcctgtgactaaccagtgcaaggcaaatcaaaccctcaaacaagtcatagagagattttacccgaaaaggtaccgagaagggtgctctgaggagcagctaaggcagctctaccagcngactctcaaccaaatggatggccctccggggacacagtgcggctgactgcattcgaatttacttgacagtagccaggaagtggccgttctttggcgccaagttgttctttgcaaaaccaatagcaccatcatcacttggcaataattgcgtgtggctggctgtccatgaaaatgggttgagcatcctagaatacacctncatgagattagtgaccagctatatgtacaaaggtctgatgacctttgggggctatcaagaggatttcatggtagtcgttagtacacagtcaaaagaccggccaacagagaagttactttttgcgatggcnnaacacaatgatttttganatcacccttctgatcgccag

SEQ ID NO: 2142 - DNA, 456 bp, Homo sapiens
gtccttggattacactggctgctctcctgaggtaaacttgcggagtctataattaaatagaaaaaagcatgtcagcaagttcacaaggtcaatgctacagtacaagatggagtcaggatcacagaatgacatcactactatcatcttcatctcatgaagtatgaacaaatcagtagagaccctattgtcaaagtccagttttgacatgactcggtctgaagtctgaagtaggtgtgggatcagcagaacatggacacaggaatcttcttgatagttcagtcaagttctctcttctttatttccccccaacccccagcttatgttcctcagcaaactctcaattacagtgtggctatattctatttttctttaagtgaatgattacaatgaatttcctaatacctttatgtgattaaatgttttacatattacaggtgaaaaaattcctaagaaccc

SEQ ID NO: 2143 - DNA, 252 bp, Homo sapiens
agctctcagcctgacctgaacatctgaggttgctctgacccgatgccgtctgcccctctgatactcagcttctggatcatgaacctcgaaacttttttttagagggctgccccacccactgctctctctcctccccgcctcacaccaccctcctcccctctccatagtgagttagaagaatctaaagggattggctgcgttctctgattctgtggaacttcttataaaatcattgctctacaagaaaaaaaa

SEQ ID NO: 2144 - DNA, 192 bp, Homo sapiens
gttgaagatggctcccagaccctggacagcaaggaaacagcaactctcctacatctggaccaacatctccatgcccattttcttaggtttcccagagacacagcgctccaaagtcagcaggaaacaactaaagatcactatgcccctaatcctgcttcaccatcatctctagtttttccttttttttttaaa

SEQ ID NO: 2145 - DNA, 318 bp, Homo sapiens
gacagcgcctgactgagatggaatgttctcaggaccagctgagggatagcctccaaagcctgcaacttctttcaaaaacaccaggatctcggagccagcccctgcctctcaaagcaccatgtgtcaatggagctgatctgtcaatgggcacttgagcatttcaccccactccatatatggtctggaagccaagagagccactacagaggattttctgactgcctcagcccttcatggccttcagtgggggacagagtgggaggtgtcaatcactctggtaactgtgaggttgcccagtaaatccatttcagaaaatca

SEQ ID NO: 2146 - DNA, 169 bp, Homo sapiens
aggacggagttgtttcgatctcttttcggccagctcaaccctcctgatgcagaccgtgggaagtgacagtagcatcctctcaggcccgacctcagcacaggacccacctgctgcctccaataaaatgatcaaaaactacaataaacctttttttttttaaaaaaaaaaa

SEQ ID NO: 2147 - DNA, 446 bp, Homo sapiens
  misc_feature (1)...(446): n = A,T,C or G
gtggtggaagaccaaagaagagacgacctgggcccatccacctgcctcacagcctgctggactgctctgtgttgctgctgcctctgggacatgctcacctgatcacctgatgagcccagctcttccgcttggccgctctgtgccacctccgataagtgtgcctggccccatctcttctgattgctataaagtggctagctctgcgcagacacctctactttctgtcctatggagttttagattagtgagggttactgctatttagttcagtgacttgatctttttaatgttcaaaactcatttcttactgatctttaaaaaatgtgctaaataatttacttttttggccaaaggcttagttatgaaatatatatttataatggttaaattatnccctcaaaggnatngcattatgggacccactattaaatctctctgtcataccc

SEQ ID NO: 2148 - DNA, 213 bp, Homo sapiens
ggagtggtttaagatgaggagagcccttttccgcagacacagcaggctgatgatgttctgcgaactgccaccgattacagagaacaactctccctgaagattttggagcagcacttgagtgcctcccctgtcgtggagccatgatggccaggacaacctttacttctctataattatttcaacaataaagatgagcattctgaaaaaaaaaaa

SEQ ID NO: 2149 - DNA, 188 bp, Homo sapiens
aggacctatgaaaagctggagatggcggcatgcatctggaatccctgcactctgttcatgggccgagaagtatagaaaggaaaatgccccaggaagctttacatgagaatgtaacacagcggcagaaatcacaagatactttgcctcaaatgagataaaagatgagaactaactcctaaaaaaaaaaa

SEQ ID NO: 2150 - DNA, 182 bp, Homo sapiens
  misc_feature (1)...(182): n = A,T,C or G
aatgtgctcccaggtggacccnctgatggctaagctttaganagctgacaggggnggtcntggctnantggcacatcccatgcttcatgggctanattcaggggcngatcacacttgttacgataagagcttacatagntgtcttcgaaagnnctggntgggatggcactcggtgtggtcgg

SEQ ID NO: 2151 - DNA, 173 bp, Homo sapiens
  misc_feature (1)...(173): n = A,T,C or G
atgacagctggaggacccagngtgtgatgctnctatcgactgcctncactttctcccacatggcccnggaacttttgtgcccaactttcttcccttcctggctccctcctccccacaccatctgnctgccacctcccacatgacacctcaaataaatcccctttgggtttttg

SEQ ID NO: 2152 - DNA, 420 bp, Homo sapiens
  misc_feature (1)...(420): n = A,T,C or G
agatgccgctggagctgaacactcctcncacactgatanatgangacgncgtgnntgangaggacnntcatnatgnntatgtaannatannanttntatntatacnnaacatgccgtatctgatangagaatctataacacctccatcatgacaaagaaatggtgaagaagtcctcagaactgcaggaaggatttgttgagactgtgagcacattcctcttctccaaacctctcctggaatgtcctagaaggcccaggaattcccccaaagcactggttcttcctatggtcaaacgtcagcaacctccaccaaacatgatggaggaaagcgtgaatgttgtcactatgacggaagttcagctttagtcccagttaacaaatattggcaataaatcaaaacaggaaaaaccctaaaaaaaa

SEQ ID NO: 2153 - DNA, 207 bp, Homo sapiens
  misc_feature (1)...(207): n = A,T,C or G
acattggatctcctacaatgatgaccatgctgccanntgntncgtgctgagagcgggctnagtgacataaaggaccagtgactgncacatntgcatcctccctgccccgnctgtcagncagtccgttncatgggaatgggncgcctggggtgggtgcactcctaaccagaatggcctcagacaancctggcttcttttacccgcttg

SEQ ID NO: 2154 - DNA, 305 bp, Homo sapiens
aggagataatttaacccttgaaaacagacactgtgccaaatccacagcccaatagcgggaccgccccctccacagaagaggtccagccagaggctcctggggagccaccggaggagcctcctgaactgaagagacccaggcttgaggaacgtgaaggagatgcccaaaacctggcccctgatgactcttccaagactgtctgagcctgctatgcacctgcgtgcagaggaggcaaggccaaagctcgaaggctggtgatggtggccaaataaacactcatgaattggttcacatagaaaaaaaaa

SEQ ID NO: 2155 - DNA, 128 bp, Homo sapiens
  misc_feature (1)...(128): n = A,T,C or G
tcccctctcctggcctgtgctccctgcagcgtganctgctccatccttttcaacgagcgatncccatacaatgacaagacattcctcaacctcatggaccttttaaatanaaatttttaccaactgaa

SEQ ID NO: 2156 - DNA, 165 bp, Homo sapiens
ttaagatttcccagggccagtgagatggctgaacggccagaagagcttgctgccaggcctggccacctgagtttgatatctgcaactcacatcgtggaacaagaggatcaacctgtgagtggtcttctggctccacgtgggcatgcaccaatacaaataaaaaaa

SEQ ID NO: 2157 - DNA, 256 bp, Homo sapiens
gatccccagagtaacagcttgtccttcctcaaggctctttgcttaggaagaaagcaaagaatagaacctgcaagatggcgtattcccttccaatcctggcggcctgagtttgatcccaagatccacacggtagagggatagaactgactcctgcatgttggcctctgacgtccatacatattccttagcatgtgtgtatctctcctctctcgaaaaataataagaaaatgcaataaaatagagaaagagagagaga

SEQ ID NO: 2158 - DNA, 279 bp, Homo sapiens
  misc_feature (1)...(279): n = A,T,C or G
accacggaagcactgaagcactncacttgaanatagntccanacccatgccananngncttgaagcatcnnttcngnggnanactcagctggngggtgacaggatgcnactacccagccctggctggggccgtctctantgcggtcanggatctattggctagaagagtgatgactnnatctacaggacaantctagcaacactgnctaanatattctactgaattncaaagtgctctgaaattttaaataaaactttgataatcctcaaaaaaaaaaa

SEQ ID NO: 2159 - DNA, 492 bp, Homo sapiens
  misc_feature (1)...(492): n = A,T,C or G
ggcagccctgaagctgttgaagacagtgctgcanctncgccttgggagtttggnttgccagactgctctgctcttccacctnaacagcccaggggccagctgtggaccctggcacatgtcatganaggggcagttttgctaagcctatgtctacaacagttatttgggggtgtggtcaccactgncacattcactgtgatgangcactgtagccagctagcacccaagagccctgcaggctacacattacagcttcctggccactctggaactgttgggcaagctgntcccaggtaccctagccggcgtgctggccgacagcctaggcccacatctctgctttgctgtcttccttgtactctcagccctgcctgttctggatctccgcctggcacccagtaacctgacctgagctggatgttggttagggctgtctataaagccaataaagctatgtatggcctggatgtctgggacacaggaaatgcagct

SEQ ID NO: 2160 - DNA, 178 bp, Homo sapiens
gcttaatgaggagctccaccggcgctcttcagtgttaggtaaaacagcaattattacactttgtgtgtgaattttcatctttgtgctttctaggtgatatgctgagttaatgtttctgttacttggaacagtccagtacccttcagaataaataaaacttacttatgtgataaaactt

SEQ ID NO: 2161 - DNA, 107 bp, Homo sapiens
  misc_feature (1)...(107): n = A,T,C or G
gagacctatgagcgcgtaagcaagaggctggcttgagctaccanngctgggcttggaggggctacgacccaccaataaaagtgtttcatggatcaccaaaaaaaaaa

SEQ ID NO: 2162 - DNA, 415 bp, Homo sapiens
  misc_feature (1)...(415): n = A,T,C or G
ggttttacctgctgccactcagagcaatgacccggatgccatccaggacatacctggcttcctgattctacttggagttggacatctgacactaaccagttgcactggacaagaccctctctcagagaactcaaaacatacctcgggacgtcattcattcattcaatcatgccttctgtaatacggctatcagaagaaggaaaatgaagacaagaaaaacaactgtgatgtgggcagcaggtacctgggggtggagggtcttattgcctctccaggggtgctgcctgagacaaagatcctcagtcaaggtacagacctttgaaatacagctagaaaagtgttctgaattgggctgncttttttaaaaagacaaattacaacgtcaataaaggaaataagtggttaaaaaaaaaaa

SEQ ID NO: 2163 - DNA, 413 bp, Homo sapiens
gagagtagcaccgtcctgttcaggactcctgcctcagtagctccagacttcatgttgggaagatatactgggcacctggatttcacagattggaaatataagtctgacaacactcaagagcaggagtgtagttatttctgctgagccttgcaaaagtaaacatactaccttcaacttagactccttggttagtggactatgaaaagccacatgtacaaaccattactatccatgtgacatctcaagatctcttgctggacatatatgaaatcctctaggattctacgtacccaggtacaatgtcagttctcttgagctgtgcttctctaagctgcagagccatgttagttgccatggatacactgcgatatctgctctaggactaatttcacacagaccaagatgccagctga

SEQ ID NO: 2164 - DNA, 239 bp, Homo sapiens
  misc_feature (1)...(239): n = A,T,C or G
cctcgcacactctcattatagcagatcccgatactagaatngcctnaaaangcacaaaatnganatggccaatngacaggataanncananggaactggttcatatgatcaactgggcaaagagagtgccaggtaaggatgctaaactcaacttctatgttaagagtgaataactttcaacagtcagctgtggtactgtggggggaaagtagtagtgtgctatgggattagggagatgg

SEQ ID NO: 2165 - DNA, 422 bp, Homo sapiens
  misc_feature (1)...(422): n = A,T,C or G
ctctttgtgttcaagtcntntctgcgccacccaccggagaatgggaagccgaacatactgaactggtacgtaacacanttccacccgnctcacattgnaatccaaatgctgaagaacgggaaaaaaattcctaaagtagagatgtcagatatgtccttcagcaaggactggtctttctatatcctggctcacactgaattcacccccactgagactgatacatacgcctgcagagttaagcatgacagtatggccgagcccaagaccgtctactgggatcgagacatgtgatcaagcatcatgatgctctgaagattcatttgaacctgcttaattacaaatccagnttctaatatgctatacaatttatgcacgcagaaagaaatagcaatgtacacatcaccttctttatatcttacttt

SEQ ID NO: 2166 - DNA, 311 bp, Homo sapiens
  misc_feature (1)...(311): n = A,T,C or G
ctaaggttgtgggtggcagagagaatgncactcgataacctccctccctctcctggaagtggtgaccagacattgccggatcatgcgcctttctaagcctgtcctagcttgccagccacagagtacagaagcacacgctcatcatcacagctgcaactctgcatgacagagccaccagccagagacagtgaagagctggttttgaagacagtcatacccatgttcatgcagatgtggctgccttggcatgaattagagaacagtcttgtacataaatgttttacactaaagttcgtagatgaagcagaaaa

SEQ ID NO: 2167 - DNA, 140 bp, Homo sapiens
gtcgtattaccaggacatgtatgtggccaagcaaaacagaatcttcaacagaagagatgtgtgagaatacaaatattttcaaaatatgttcaaaaacagttgaaataaattctacaatgtcaggacgattaaaaaaaaaa

SEQ ID NO: 2168 - DNA, 406 bp, Homo sapiens
  misc_feature (1)...(406): n = A,T,C or G
ttgcaccacatttatgatctgatgncgaacacngantatcancggtcatcaccatcatgtctataatcctgtggtacgtaagtgagacctgcctgaactgtacccactctcaggactcttgtctacagacacgcttcanaccaaagctgaaacctctgtcatcgcagatacaaggattctcccttgtgatggatggcagccacggagacgtaacagtttttaattaatggaaacccagaaaaggaggaaatgatcatggaggctgtttgagatctagggatcccacaagggaatcccacaggtcttgccttagntgtcctgtcccttgtcccttccctcagtagattatctgtggtaaatagccaggaagaaactgacaagnaattctactgtgctcgtggagaca

SEQ ID NO: 2169 - DNA, 387 bp, Homo sapiens
ggcaatggactccaggaagctgctgctccaccgcccatcatgtcgccctctgtgcatccgtcctcatcccaggcctgctcctccacctggctcagcgaggcagagatgatcgcccttgctggtctgctgcagatgagccagggagagcagacacccaactgcgtggcaagctctctgccttccaccagctgcccagaccctgtctctgtctctgaagacccaggtcccagtggtgaccagagctgttctgggactgacacatgaaccacatagtaccccaataaccacagtccatagtgtaccctgccccccactcctccacgggtgctttcttctcccccaagctgttttgttgacaataaatcagagtttgcaaaccaaaaaaaa

SEQ ID NO: 2170 - DNA, 444 bp, Homo sapiens
  misc_feature (1)...(444): n = A,T,C or G
ggatctcacagttctcaggacagtggttgacccgtcnagtgttattaactcatttcacagagganggaangaanncangacttaaganannaagaggaggcccaaggtcagggggcagacctaggagacagaanatgttcaacccagccctagggttcaaaggtgtgggcgatggaacagaagtaatcggcatcatcctccgggagcacggggctgatggtgaggatacaggcgttgtgggctgcatccacggtagctganaatctgtcggggatgtcagcgggccgatagtgttcctcttctgcgtaatagtagagaagatggggagcacttcctggctgctgctggtaccacgacaccccaatatctccagcggtggcatgctgggaattgatggtgcanctgagatgagcgtcttggcctgggaagactgagaacgcgtta

SEQ ID NO: 2171 - DNA, 101 bp, Homo sapiens
gaacctgtctctctcctggctatgagacggaaatgtagaattctacacatctacggtgtaccaataaaatgcttatgtccatttccaccataaaaaaaaaa

SEQ ID NO: 2172 - DNA, 385 bp, Homo sapiens
  misc_feature (1)...(385): n = A,T,C or G
gaaaagaaatgtaaancnaagccatacatcaggctnctggtangaagatggcacnngcantaagctgacggtgatctgtaggaatcatcttgtggcaagggcactagggctgagtcctagtgagtggtcctccatcctcgagcatgccagggggccggggagagtggccttgcagtttacagggctaggaggccaaacagagtctgcaagcaaaacccatgagcccttgaccctgctcctccggacactttgtaccagcccctttgtcctccgacccgttaagctttcttttgcacttgaaaggagacccactgatattttcccacgagaaccgtcccggctgcagcagttccagtgtggagagctccctctgctgaccagagtg

SEQ ID NO: 2173 - DNA, 140 bp, Homo sapiens
  misc_feature (1)...(140): n = A,T,C or G
atacttgtattatcatattcnttnnnttatactgggaactgccnnnaaagggatgtnctttatgtgacaaacttccagcaaacttgtattttcatattccttatatttcactgggaactgccaataaagtttgtacttca

SEQ ID NO: 2174 - DNA, 439 bp, Homo sapiens
  misc_feature (1)...(439): n = A,T,C or G
cccgttacttttggaccatcatcccancnngaaggatggatggatccgtcttgcctgaancttgacgcctcacagagtctacaggtcagaatatgagtacaaanaggctgngtgtgaaagnataacaacataaaaacagaattctaggcctttaggcccaggcttggaaatgnngcctttgtaaaggtatgctaatcataaaacagatagcaacattnctccacccacccgcttcctgggttcaaagagngctcattcaaagaaagtcacccagaacctgcaatgcaaatgtgctattgttagggactcttaaaagctgtcttgagagttaacaattaccaggtnattccttgngactcttgtaactttacacttccttgngactcttaactggtnatctttggtatnttccaacntngccctttccacttccttaaac

SEQ ID NO: 2175 - DNA, 299 bp, Homo sapiens
  misc_feature (1)...(299): n = A,T,C or G
ggttccagagacacccacactgagcatggaggcctcccgagatgaagaggaaactgaactttaccggcgcttaggtggccgcagtggagaggcagaggtgtgagttgctgnctgggggctcccagggctcctgcccacaccctgacttcttctaaggtcactcaccgtcgtcgtctgaccccatcaggttctgctgtcggaggcggtgactgtcagtgaggaacagaacaggagagaagaaaatgagtgtcaaaggacagcccagagtcaataaataaacagttagtaaataaaaaaaa

SEQ ID NO: 2176 - DNA, 229 bp, Homo sapiens
agctctctaactgatggggagttatggctcttctggacacagcatccactactggaatgcagaatggccagcatcagcaggaaactgattgtcctggccctgaaaccccatcacccatctatcaagaattaagtgttggtctgggggtatcaggcacgtgatagaacacttgcctcgcatgtgtggggccctgaaagtaaagtgcagtgataatgcttaaaaaaaaaaa

SEQ ID NO: 2177 - DNA, 301 bp, Homo sapiens
  misc_feature (1)...(301): n = A,T,C or G
ataaaactaaagctaatggctttatgtgatttacccaaggtgaaattgtttgttgaaacacggtccaagaatggagtcacatgaggagaattctgagtgcttacttgtgagaaaactccaagaaaacgggacaagagtcttgtgacctcattttcttcaaaaacacaaaattgttcttggaatgtgttttcatgctcttccaagtgtagtagataagagtgagtttatttaataaataacaactggctattgttatttgnttatatgcctctatgaaataaacgtttttgttgtgtgcaaa

SEQ ID NO: 2178 - DNA, 148 bp, Homo sapiens
cagcttattctgtgcggtggcagcatttgggtgtttctactattgaatcgttgggaagtgtgacttcaaggaaccttaacttttttatattgttaaatttcctgaccaaataaaaacaagttggcactttggtacctaaaaaaaaaaa

SEQ ID NO: 2179 - DNA, 202 bp, Homo sapiens
ttaaagggtcccgggcacaagagaaaaaagagagagagagaggagagagagagaaagaaaaaagccactgggcgattgaaatggtcgcattgagatgcgtggagccggctgcagcgcgcggactcactcaaggggtcaagtgacggacggattgttcgctccttcataataatattaattaaacaatttgcatgctaaaaaa

SEQ ID NO: 2180 - DNA, 278 bp, Homo sapiens
aggagcgcagaccctgaggtctatgaaggttgggacctgcggacacgaagtagcataccctttggagaaccagggtagggttactctccagatcagcagaaggcctagagagggaagggctagctttctttaatggcaacttgaaatccagcccatctttgatactgactatggaattaaccacctttctccataaaattctctagtcttccttggaaaccctgcaaaacctatgagtgaaacataaaataaactcctcctccctttaaaaaaaaaaa

SEQ ID NO: 2181 - DNA, 242 bp, Homo sapiens
  misc_feature (1)...(242): n = A,T,C or G
aggccctctacagtancnactcctgaacagatcaagtttcaggaaggctgacctctgacaaggctaagagccacacccagaagaccagcacccacacctcagctgcctgtgcctttctggagttatagctgccccgagtcgaagtcctaggagatgagccccctgtctgtctgcactgatggattctaaattttgtttttgtttgtttttaatttaaagtgagttttatatacaaaaaaaaa

SEQ ID NO: 2182 - DNA, 397 bp, Homo sapiens
  misc_feature (1)...(397): n = A,T,C or G
tcgcctgccgcccacccgcaccctatttgngcttgaggtgatggacntgaanacaccggaccggcgactcctcatcctgggactctgntattcggctgtctccgagctgctcccgacactcctggggtgggcgcaggagactcccgctcagaacaagaacaagtgagtctgcttggtgactgccctgtgccatgggcactggctttacaccccaacggcgtgcacacgagtgtgccctctgcacaccaagctctgtggacacgagtgcagctcctgtcttgcctgatgcggtatctgacaacccagtgccctatcgctgtcganaacctngaacnnntttccattcnggaaagtgggtcagccatccancaacagttccagcatcgcttcccacggc

SEQ ID NO: 2183 - DNA, 304 bp, Homo sapiens
tcctgtttccccgtggcatcaaatcacattctgcctgctgataggactcttgtttgcaatagacacagtgctgtatttctctgtgcggaggggtcttcaaagtcctgtggctgactatgaggaacccaagattcaatggagcaaggaacctcaggacaagtgagctcttatcgcatgcgatgataagagcaatggtgtagaacccatgagcctccctgggagcttgcaacctcaccagctgcattggtcaccatgctttgagcagcagaaataatacaaaggccccttccccaactgaaaaaag

SEQ ID NO: 2184 - DNA, 311 bp, Homo sapiens
aggagagaagagtgctcgctggcagatgggactccctgcggcagtagttccagccagaaagtgccaatcatttattagaagggtcggggcaggaactagaactaaatttgcttctcagtcccaaacctgagggagagactcttcaggatagagacatcaaggaatagaccttcaaaactaggaccgggtttcatctctcaggaggaatgggaccactgagcaagaagaggcaacagccttccctgtgacagcttggctcactcgctttgatcactttgggtgagtgcctgccaaaagaagatgtttgtcat

SEQ ID NO: 2185 - DNA, 361 bp, Homo sapiens
  misc_feature (1)...(361): n = A,T,C or G
gtaacgcttgccacagtgcagaagttnnttcaacctgncaggcagaggaagccttttgatgacgcaaaatgtgttgagtcagcaaagaagattttcagttaattcaggcaactataagtacatagcccccacaaagccaaccttctaaaattttgcatcacattgaagtgttttgactaagtgttgaccctacttagaaagctaacaagttttctaaggcgtctgtgtcaattcaggtagacatgactgacgaggaacggccggatgctctctagttgtagttaaaattgaaatcatgatcacttcctcggatattttcttactgttcaataaaacaaaacaagcttcttaaaaaaaaaaa

SEQ ID NO: 2186 - DNA, 293 bp, Homo sapiens
ggggcaggaaattgacagaacgtttgccttagcacaatctgctgtatgaaacacgaacgtggaaagcagtgcctgtaaacccagaactcaggagagtcagaggttcaaggtcattctcagctacacagtgagtctggggccggcctgagcaacatgagaactgttttcttttctatatgttcacaccaagcttctatgcgcccttgggacctccgccttagctacatcaagctgtgacgcactcaaaggaaccgttatcctatcaatccctaccatgctcaataaaaaaataa

SEQ ID NO: 2187 - DNA, 364 bp, Homo sapiens
ggatgattctgacagctaactagctttctgtgacggtggagccggggaggaggccggtagctatcttctgtcatgctgaaaaactgggatggtgccttcttcaactacttggtttgcatcaagatccacagagacctctgaactcttccagaagctctttctgaagggtgcccctccacgtgttaggtcttcctcctgggcgcctgcctgagcgtgctcctgcatcaggtggggtgggacgctgaccgctggggctgacttcccactgactcgacttagaatctgtgcttgggatgattgggtgttgggacatgtgttcaaatgtggcaaagcaaaggccaaagaagaaagagattattataaa

SEQ ID NO: 2188 - DNA, 641 bp, Homo sapiens
  misc_feature (1)...(641): n = A,T,C or G
ccgatttatacactaacatcttccanattctgaaacctgatgccatcacatactttgggctgagaaaagaaaatcaaacatttgtttgatgcagcctccctccctcagccttcnancaggctgatccanactttgaccttgctgccgctaanaagcgattacctagggtagagccttctgaccttgatggctctatttgctcttctccttgactctgcttccagctgaaaggtccctgacacagtccaaagacacaccctgtagatcgcctaagggctggctccaggtaccaanaaatgggttggcaggggatgggccttcccccttataagcacactctcttaataaactcgggggccttgaaccgaacaaataatnctnaananttttttcccantttttnatnatttcccttcccnttncccctttttcctcnttgttccnttctnntcttcctctnctcttctccntnnctcccccttcttnttgctccccctttnnntatttttnntncatcncncnttttcnnttntntcntccncnctanncgccccntntntcttaatctttcnctcaccccattttnttntncatctngttttccgcacntttccctaggttnaccagtttttcctcgtacg

SEQ ID NO: 2189 - DNA, 280 bp, Homo sapiens
  misc_feature (1)...(280): n = A,T,C or G
gggtagtaaaaaggcagagactgctggcaggaggncctggnaagagagacctnaagagggagatntggcctaccacaattngganaggaagagagatcactttacgccatgatcatatcatccacctcataagtatccataaaactcttctacagtccacagtgcagaactccctggacgacttcctgccttggggcagccgactgccatccaactttggagtatctgcnttgcttagctttgctaaataaatttctgcttatattgaatataaaaaaaa

SEQ ID NO: 2190 - DNA, 265 bp, Homo sapiens
  misc_feature (1)...(265): n = A,T,C or G
ggtatgggaagagagccgaggaggagaacacaggtggacttcctggagtgcagctctccccctgcaccagccccccagttggcttgattccctgctctgcgccctggagctgaaggcagggagctctgncnaanggacttgcagcctnncttgtnttcagcccgtggntgaaagaaantacaggnccagctctttnntntgcaggcttgnaacaacctgctnncttgcaaactaaataaagcaaattanaatcataaaaaaaaaa

SEQ ID NO: 2191 - DNA, 349 bp, Homo sapiens
  misc_feature (1)...(349): n = A,T,C or G
atgaggaagcctgaacgtcaacactctgcgcggagacttcggctctgcagccttccttccacggtggtgggcatcttgccaatttgcaggaccaagaaagaagcccagctgctctcagaggacccgaacttcaattttaaacccacctcctctcattgtgtccggccttctgggcttacagcatttcaataggagcggggtggggtggggtggggtagctctccaatggctgaccgcactcttaagagatgatttaatttccttatccttgntntctcanaacngngtntncntnagntanagggntcaacancnttgcgnactttnaagctgaataaaaccccttttc

SEQ ID NO: 2192 - DNA, 273 bp, Homo sapiens
  misc_feature (1)...(273): n = A,T,C or G
acacatcttgatttcctggtaaacaaactgagaggcacggtggagcacttggtgcgccggtaaccgagagagctcacgtgaccacaccgcgccagcatgcaaacatggtccttatgtcgncagagaaaatggtgaatggaattcctgccacacagacgtatgtcaagacaaaactattatttcaactatttcaaaagtgtatgcacgactgtgttaggtcccacaacagttcacatttaaacaaataaaacgttgaagagaaacagaaaaaaa

SEQ ID NO: 2193 - DNA, 238 bp, Homo sapiens
gtgggcgccccaattccagtgcagcgaagcccgaggcccagccaggaacaggtggaccagttgcacgagttatatgtagagcatctcacacggctgtttgaagaacacaagatgcactacgggatccctgctcatcaacaccttgtcctgatgtccatgtccctgtgtcctggccttcctgaaaaactgcagggtgggattggggacatgattaaaggtggaagcagacaaaaaaaaa

SEQ ID NO: 2194 - DNA, 184 bp, Homo sapiens
  misc_feature (1)...(184): n = A,T,C or G
ggacgcgttctgcctcccacgcctgggggtgggggctatggagacccggaggacccancaccnccancaggctcgcccccgctatatccagncttcccagagcgaggcagngtgnatgagtaccgccncncccaggaagcannatgagtgcccccacantanagatcctttgagtcgcaaaaaa

SEQ ID NO: 2195 - DNA, 109 bp, Homo sapiens
tgtgacctatgagcgcagtaagcaatgaggctggcttgagctaccaggctgggcttggaggggctacgacccaccaataaaagtgtttcatggatcaccaaaaaaaaaa

SEQ ID NO: 2196 - DNA, 155 bp, Homo sapiens
gaagataacccccagtgccatcacacagaggaaatgaccacaatgaattgttacattatgcctggtctttctcccaagagaccatcagctccggggtagtaaactaggtgctctccattaataaatctgatgatgcgatgctgtaaaaaaaaaaa

SEQ ID NO: 2197 - DNA, 287 bp, Homo sapiens
  misc_feature (1)...(287): n = A,T,C or G
gaccaaaaagaagacctgacgtcatcctgagcacccncgccatgcanagngtgttcgcagactgccaacgggctggctccggccagcagaagtgaacagaggtggaggttcancctgacagcttctccccaaagccatggagagaaaaccttaccacccccaccgcccagctacttccagcaagttgtccagcctgacccctctatttcccctgttgtctcttatctgggtccctgagacccaccccatctccaataaagaacattgcatactgtgaaaaaaaaaaa

SEQ ID NO: 2198 - DNA, 114 bp, Homo sapiens
  misc_feature (1)...(114): n = A,T,C or G
catatgccttgcatcctgaccccacgttctcatggatggaggtcccatatcacaggagcttctttccctttgctcngatctccaattnaagcctttgggacttgaggatggaga

SEQ ID NO: 2199 - DNA, 299 bp, Homo sapiens
  misc_feature (1)...(299): n = A,T,C or G
gacgtgagctgtcaacgctgagcttccagctgcnncngccnttnnagntcgngncccntgacatcntggaccctaaccctntgaaaccgnanccncannataaactntntnttcttctnntganggaaggaaaacatgaaccanggtggctttaccaaccacangtntttgtgacatcataaagttagaataattgggataaagcttttatcattatcaattggttctgaaattactgtattggcatcttgtaaattgagactttattgatacataaatctgattggttaattataaaa

SEQ ID NO: 2200 - DNA, 408 bp, Homo sapiens
ccgaagtcccagcttgaatcgaaagaaaatcagaagtttgatgtctttaaagccatatccttcaagagacagatagtggctggcaccaacctcttcatcaaggttgatgttggtggagataaatgcgtgcacttgagggtgtttcaacccctcccccatgaaaacaagcctttgaccctgtcttcctatcagaccaacaaagaaaggcacgatgagctctcctacttctgattcggggctcctttgcacctgtgtttgggaccacgtagtaaaacccccctcggtgatggagagaagggagttgagcagcttctgttgtgattctcaaactgcgttgtattttgcatccttccaaataattattttcagaaaactgtatatgatctctctaaatatatattttttaga

SEQ ID NO: 2201 - DNA, 381 bp, Homo sapiens
  misc_feature (1)...(381): n = A,T,C or G
gccttttcatccctctgctaacctgacctaggactgggctgcctcctgcatccacagcaaacacagngagaaggctgattccatgacaggcttcaaatgaacagttaaggagactagacctaaaaatacaggcttggctttgagcagccagtcagaaactgccctatcacctggcctgaagcaaggacaatgggtcagcagtttcctgctggcccccacgccccagtaacggaatgtcctttgtgatagagtaagacaaagccaacctacctcgggattcccctaaggagctttaaattgaacctgtgaacttcagagtctctctatcttggtaatgggagaccccagcatgctggacttctgcagaataatcactctgca

SEQ ID NO: 2202 - DNA, 188 bp, Homo sapiens
gattgaagaggaagccaggcagaagaagatgtagatgcactggcccaggtggatccacaacacccgagtataacattgaccctgaggcttgtgacctgttatggctctgtaattgtgtaagcttgagcgtttttatacccagcagcgtagatttcataataaagtagtttgttgtggaaaaaaaaaaa

SEQ ID NO: 2203 - DNA, 303 bp, Homo sapiens
  misc_feature (1)...(303): n = A,T,C or G
aggacacgatgtggagcggctggagcgcatgcaggagcagttaaagaaggctaccgccatgctaggggaggctctcgggagggaaggctgaccccacgccactccttccccacactccctgaggctcaggactgttgacctcagagcctcctttcaccgggcattctgctccacttccaactggtagggactggaagcaaggatgtgcctgagaaccaagcctgagagaagcctatgggcaggggctggnctccggctgactcaggaccccgccccacccctccatccctgagtgaataaagc

SEQ ID NO: 2204 - DNA, 106 bp, Homo sapiens
  misc_feature (1)...(106): n = A,T,C or G
tatttactttacaatgatgttagncnccccccatacttgagtaataaaantggcgggtttggaancgtgctgtatacataaatgaataaataaatctttaaaaaag

SEQ ID NO: 2205 - DNA, 335 bp, Homo sapiens
aggacctcaaccaactgaagagttgaccccgccagtctgcgtctctctgtcttcacttgaatgtctttgagaatatgtaaaaaggagccacatgcacctccacgcagtgtgcaggacgagaacttccgtcattgtatataggcctctgccccgtctccccttaaggttatccactgtgcttgatgagtgagcagtcaatacatctgctgcccgtcggcattctgggttaataaaactataggaattatttcacaaacaaactatggaaagcagtattaaaatctgagttctgtatctactttaataaatgttttgggtctctttgaaaaaaaaaa

SEQ ID NO: 2206 - DNA, 141 bp, Homo sapiens
  misc_feature (1)...(141): n = A,T,C or G
tgtgggtgccctaaggcttggaattcngtggtggaagntgntncncanngcgacagtccatgccctntncctcgnagggctctttgtcatcacgaggcntggaccnaggaagtgacncccgtgctacgggactatgatgga

SEQ ID NO: 2207 - DNA, 433 bp, Homo sapiens
  misc_feature (1)...(433): n = A,T,C or G
gggaatcaacagcaaaggattggtgagctgcagaaattctcatggattgttgtcttctcacacagcanaagacgtcagggacccctttcattctggtattctcactgcagataggctctgtggaataacagttcttcccacccccctgcgtatttttaaaatgttttgttacctcttctggccatgatagtgtctagtgatgccctctcccattctcacagatgatgccgtttccctcttagtactttcaagatggctctctgtgtctggttttcagaagtttcaccatgtgtcttggtgtggattctttaggtttattttatgcttgttcagcttctctaatctgaagaagtcaaggtttatgtctcttgacaaattcagaacattttcacatgaccaacattattattattaaatggtttctctgtgtaaa

SEQ ID NO: 2208 - DNA, 202 bp, Homo sapiens
  misc_feature (1)...(202): n = A,T,C or G
gtgagaagagactaggtgtgacttaagagagaatgcattnttaacaagttcttttcttctcggctaaagaagtcccggntatncttcaccatggagctcacgcatnagcttctgcagaaagacttcccaaatgtcaccaagcagcgtcctcactcttgagagcaggattaataaattatttgntttacctgaaaaaaaaaaa

SEQ ID NO: 2209 - DNA, 255 bp, Homo sapiens
gagatgtcttctttggaccaaagatctcctttgtgatcccctgcaacaaccactgaggatctgccttgcactctggagaacatggtcctgaaggccttcacgtcccctaatttcccacaaactctgtcagttcagcgccatttctgatatccatccagtatatccaatcttgcatagattctataaagtcttacttgctagagtatacttgggctaaagtggtaataaaagttgtttccatttgaaaaaaaaaaa

SEQ ID NO: 2210 - DNA, 120 bp, Homo sapiens
  misc_feature (1)...(120): n = A,T,C or G
aactgtgcgtatcacaactgagtnatctcccctggcagcggacatcttgacctgcctccggagctttgctttgtcttccgtaggtcaaggcgttggntctctctctctctttttttttaa

SEQ ID NO: 2211 - DNA, 259 bp, Homo sapiens
  misc_feature (1)...(259): n = A,T,C or G
agggcctgatagaccttgtcgagctgaccncctanatnctgtgatcgattcgccgaggttanctgananangcaaccaccattacagagngtcttcataccttttgtaaaagctgcattgtgagacatttttactatagtaacagatgcccaaaatgcaacatagttgtccaccagactcagcctctttataatataaggttggaccggcagttacaagacatagtatacaaattagtgatcaatctagaaaaaaaaaa

SEQ ID NO: 2212 - DNA, 128 bp, Homo sapiens
  misc_feature (1)...(128): n = A,T,C or G
ctgcttcacacatttctccagacctncgttnctntatggcncagaccctgtgcgttgctnaggntnctacacggccanaagtgnanttanctttccgtttccagcatctncccgttcccgtatcttcc

SEQ ID NO: 2213 - DNA, 126 bp, Homo sapiens
tgtaatggaatccgatgtcctcttctggtctgtctaagagatctacagtaaataagtaagtaaaaaagaaggaaagaaagacaagaaaaggagagtgaatgaaagattttttaaaaaaagattata

SEQ ID NO: 2214 - DNA, 409 bp, Homo sapiens
  misc_feature (1)...(409): n = A,T,C or G
agcaaattaaagtgctacaaacagaggaaaatcctctcctgccggatgaaaagcctgctccaggtctggttccaggtccgaaatcccatccctctgcatcctctggcaatacgctccttccatcagtcatggcatccaccattttactcgttgcttctgctgtaaacttcatcgagctatagcttgaaacgctatcttaatctttatctgaaagactgctatggggatcccacaggaagtcaagagaaaaaaatgtagttttccttggacagacttgactgtataaaagaactgtatatttgttcctcattttacaatttaaaaagctggtccagatagtatcatagaattaacttttcatttctggattaantttaaggactgcaaaaatcccaaagctatatacttt

SEQ ID NO: 2215 - DNA, 422 bp, Homo sapiens
gggtgacacctctggagacttcatgaaggctttgcttgctctgtgtggcggagaggactaaagctcctgacctcagagggccccctctaccaagcagtggccaactgcaccagctgccgccgtgacctgaccaagccattgctccagcttcaggatctaaggaagacgcaaggggtggggttggactgtccatccagctggggcactctctagccattgagggtcccaggcggtcccttctgttatccctcccgctcatggctaaggggctggtgaaccacggccatatactgcattcaactctgatccccttctacctactcctccgcccgccctggtttccatccctccacataaccctgcctgacttgagctttgtcacatctcaagacataccaaacctctgtctatgaaaaaaaaaa

SEQ ID NO: 2216 - DNA, 208 bp, Homo sapiens
  misc_feature (1)...(208): n = A,T,C or G
aggacggaaggggaaggagcctnggagcctcagagcaccggggccangcctngaganaaccagatntnagccggcgcagatacgcccagcttataacaccctncaccgggcctctcttccggctagtccaaaaaagcgaccaagctttaaacaagattccacaaacgaaacacaatttaaattaaataaaaacacttttccacccgcc

SEQ ID NO: 2217 - DNA, 206 bp, Homo sapiens
  misc_feature (1)...(206): n = A,T,C or G
aggcgtgtccctatgtagctcaggcttgcctttgacttgngactgncctgcttntgccacctgaatcctgcatgtgacatcccacgctgtacagtnaggaagtctcacttgcttncacaccaaacccttttccattngggtcacttgangaatctgtgggagtccactgactacaggnctggaaaaccggggccccgaatgaagga

SEQ ID NO: 2218 - DNA, 222 bp, Homo sapiens
  misc_feature (1)...(222): n = A,T,C or G
ctatatgtgtaccacatgcatgccctgtcccncctgangccagcaagaangtatgnnaccttantanaattgaagctaatggatggttatgaaccaccaagtagatgctggcaactgaacccaggtcctcggaaagaacaacacaagctccaaacctccgagccagctctccagtcggcccaagactcacggttttaaaacactgttcatgcgttgcctgca

SEQ ID NO: 2219 - DNA, 242 bp, Homo sapiens
aggtctggcctcccctcaggaacccaattagtgtggcggcaggtggcctacaggatggtgtcttctgacctaggtgaagatcttccaccttgctacacctgcaatttcctacaggagcagactgcgtgctgagctggctttgcaacataatccagctgaaacaaaggataaagctgtggatttccccctatataaatgcacagctgaaaattaaactttgagccttgattagaaaaaaaaaa

SEQ ID NO: 2220 - DNA, 146 bp, Homo sapiens
  misc_feature (1)...(146): n = A,T,C or G
caaacgggagccgctntgnactgactggctgccttcctcctcctccccctcctcccccttctgcttcagatnnattgantatangtaagtacacatgtnncagtatgtaggacacactagacgagggcaccagatctcattgtggg

SEQ ID NO: 2221 - DNA, 364 bp, Homo sapiens
  misc_feature (1)...(364): n = A,T,C or G
cttataacaagtattaagggtccagtatcctcactncccacgncangatttcactgggncttattacagataatgggaggcacacagggagngcaagaaaatgtaatgctactaggctgcggnccagaagnaccttctggttcacgagaaggnacgtgtatcttgctagctcctgncaaagncctccccaacaaacgcacctggtaaaagactgnaagggcgtactcttcatccatttccacgttcatcagtaagcagcagccgttgagcttctctgaaactcatccggccatcctggtttctgtctgcttgctggaaccactcattcaacattccagctctgagtcaaggcaaaagctcggtg

SEQ ID NO: 2222 - DNA, 236 bp, Homo sapiens
ggaagtctgatgagcgaagcgttctgaagttggttggcaaactgagagatgtgctcgggattctcggcatgcttgctttcccttgcctggctggccaagaactcttcagcatctgtgaggggttgaaagatctcaagccgtgaagcctttaaaagccaatgtgcagcttgagagtccagggcagtgtctactgccaagggctttagcttttcaaatatatttttaaaagaaaaaaa

SEQ ID NO: 2223 - DNA, 104 bp, Homo sapiens
gcatcaagatgacctgatttcccacaagcctgggattgctgtctatgcatgtgtctgtgtatctacacatacacacccataataaaactacatatatttattga

SEQ ID NO: 2224 - DNA, 299 bp, Homo sapiens
  misc_feature (1)...(299): n = A,T,C or G
tacctcacccgtccctggatgcagnggcgacattngcagganggnccancatggctaaganagnctgncttncgcctgaccccncnangctgaanctcacaanacctgcccttccangaggacattngttnagaagcctggccaccgnncatgagcangtgngccaaggatctccatgcggggccacactggctctactgtgttcagtgagggagggatatgctgtatttgcagcanggactcagaacatanntgctgatcacagagggacncactagagcaggttgtgagttataagc

SEQ ID NO: 2225 - DNA, 336 bp, Homo sapiens
ggtcctccctggacacttcctgctgtgcagctttctcccaccataggaatcattactctgacttcactggctgggatctggggacacagtgttcacagtctcattctgaagtcccttgtttgtcccaattgtctgttaggatgtggggatctcgcttgttccatgagaaatggcagaggcttttcctataaaagtagcacacaagacgacagcataatctatgaaatcaatattctgtccatgtgaggtttgtaacttttagtaccactttgaattaatgatgttcaatgaacagtttaaaactttataataaattgaattttaagacaaaaaaaa

SEQ ID NO: 2226 - DNA, 228 bp, Homo sapiens
gcactctacccctggaccccggattgcatcataaagcagtgcctgctcctgcttcctcttctcctcccctgcctgtaaggtcctcctgttggctcccttccctactctgcatagaagctgcatatgaacagcctcaaccccatagcaattatggtttctgtagtgtcctgcattaaaaatgctatctctcttcgtcaacaataaagggtttttacaaaggaaaaaaaa

SEQ ID NO: 2227 - DNA, 121 bp, Homo sapiens
gacagggtttctctgtatagccagcgcttgactgtcccggaattcactgcatagaccaagctgacctggaactcagagatctgcctacctgaataaaggtgtgagccaccatacttggcca

SEQ ID NO: 2228 - DNA, 337 bp, Homo sapiens
  misc_feature (1)...(337): n = A,T,C or G
aactttggtccccattcaccaccgtcatcncgaanaggaacaagatgnncntactatgtccggagnnactaccaccagacntatacctgtaacaagtaacccaggacggantactgcnggcnctcangggncactggaaanntcctgccccatggcccattanaaaatantttctctncacgaaactgtgccctgnaggcntncatcaacaccatgaattgaatggnacggagtggnantgntgaagaantaacatanggctctntatggcaaagcacacacaccacacgggacctttacatgnaatctggttgttattggggtttggatttccaga

SEQ ID NO: 2229 - DNA, 146 bp, Homo sapiens
aagagtgcctaccgaaggagtgggatggctttcctggcctgctgaggggaccatggccgtgcctgccgccacgaagagggagtggttcaccgaggtcattcttgcctgtcctgccggaaaataaaataggattttatgttctcctg

SEQ ID NO: 2230 - DNA, 240 bp, Homo sapiens
gggcatactttgagaagacacacgagcagctgacaccccttgtcaggtcagcaggaactagtctggtgaacttcttcagcagtttaatgaacctcgaggagaaaccggctcctgcggctaagtgagatgtgccaggcccagtcttcccaccccagctgctccactggccaccgctagagcccctctccctaccttctgcctgttttctccaataaatgcggaaggagttaaaaaaaaaaa

SEQ ID NO: 2231 - DNA, 280 bp, Homo sapiens
agcttcttttaatagtataaagcgaaggagaaagcggcggtgatgctgttcaggagagcacacacgtgaagacaaatacggtgattactcttttcacggcgatggacaccaggaacaatgcgagcatctgagggcacaagacttcatcacagggcctggctttctcatcctgacgcacccacagcaaggcctggattatgcctgcttttgatctcactaatttgctattgggacagaagttattcatttggggtgcaataaagaaattccaatttgaacg

SEQ ID NO: 2232 - DNA, 267 bp, Homo sapiens
acctcccagttcctgaagatttcctactgtctagatgctgccacaccttcctgccagccagcccagagggatgttccatcaccttcacagtatttattatcctctgccacctcactgctcccatacagacatccttacacaaccagcaacgcaacaaggaacactgaaaaaatgcctcattctaataaagtgactttctccattacccttacccctctacagacagatttaaaagcagacagaacaaataaacgaacagcaacaaaa

SEQ ID NO: 2233 - DNA, 123 bp, Homo sapiens
  misc_feature (1)...(123): n = A,T,C or G
gggaacatttgtgggcaggaaagaccnggaaagtagtgctggagaaggagactggagagaaacactgggcctgtccctgtgatgcacttctgccagcaagggcacgcctaccagtccctgaag

SEQ ID NO: 2234 - DNA, 315 bp, Homo sapiens
ccctctacactaaagttggtgcggttttgagacagggtctcgggtagcccaggctaatacagctgaagatgaccttgaactcctgcttctacttcctgagtgttgggatttcaagtatgtgctacgataccaagctgaattaggcctctaccatcacatgcaaggacctgaactacatacacagcatcattaaacaatgcagtactttgttctgaatagttttagctctattataaatgccatgttttacacctgggagatagcaatatgaagataaggctcagtaataaagatgctgacagctaaaaaaaaaaa

SEQ ID NO: 2235 - DNA, 361 bp, Homo sapiens
  misc_feature (1)...(361): n = A,T,C or G
actgagaaacagctctgaagcggtttgctgcccngctagcanaccnnnnctgggnttgngcgctacctgccgntgnaatgctcgggagattgccacttccacaactgctttttgctgccatccttggaattgctggaggaatgtatatttatcagccaatatttgaacaatattccagagatcagaaggaattaaaagaaaaggtgaagttgttggaagaatcagaagaaaagggagctaattctgcataaactgaaattgtaaaccttgcttaacgttctattgaaatcacaccgactattagtctagtaagactttaggtatgctttaaataaataaatcatgggtaatgaaaaaaaaa

SEQ ID NO: 2236 - DNA, 329 bp, Homo sapiens
gactgtgaagaaggtcaagaggatggctcaaggaatgaaacacctttttctacaagtgaagactctgatttagaaacggaaacggtcgagcttggtggagggttttatgtgaaatcatttttaaagtattcagaaaattctgtcccagccactcaaaggttcctgacctatctgaagtcatggactggtgggcctggcccgcaagcgtgaacagctgctgaattctgcaaacaaggacttggctcagtatttgatagatgccttgatttccatttcatgtatttaatttaatttaataaaatataagcattaataatgtgaaaaaaaaa

SEQ ID NO: 2237 - DNA, 396 bp, Homo sapiens
  misc_feature (1)...(396): n = A,T,C or G
gctctggggagctcctgcattaanaaaaaactgaagngcantncggcttaagtcctaaatcaatgcgcctgaaaatctcgttcccaaagcgtgtctgtcagaactgttactatagcttgcagcatgagaggggggcagaagatggacctcggaactgctgagatggagggactggcgagagaccacagcctaggaggctcttcacatcctgccgggactccagaggcactgaagcagtctccgtttacacggctcttcactgagtgttggaagtgctgagtgtaaaggaatcattggatcacggcttccgaggccagtgaccggcacgggtactgtgcagtgaacagcacaagaggaagtggctcccaggagcatctcagacctgagtctccccta

SEQ ID NO: 2238 - DNA, 369 bp, Homo sapiens
  misc_feature (1)...(369): n = A,T,C or G
ggtcttggtgcaactgaagcaggcgctatgatgtgttgtttccatctgagcaaatttcctataaagtatcttatcagttgtctggagccatagcaggaagtcacttagatacatgtcatctgaaacccaaagtttggacgttctccaaagggtcatctggatcggtgtctctacttttctctcagcaatgctgaggtctcattgctaacccctgaggataagggatggctagaattcagcgtataacagaacataagaagagctggaggaggcggtacagacttgtantcccagcactcaccangctngangcaggaaggggtggcctaaaagttccagacccaacctgantttccagggggaagacct

SEQ ID NO: 2239 - DNA, 102 bp, Homo sapiens
  misc_feature (1)...(102): n = A,T,C or G
ccctctgattgccctgtctaccctttgcattgctggacttcagatctgaccccatacctgcctgttgcttatgancctcanatccaaagttggccagcattt

SEQ ID NO: 2240 - DNA, 786 bp, Homo sapiens
  misc_feature (1)...(786): n = A,T,C or G
gtgctgcgtgaaggcccttaccccggcattcctggtctgtgtaggatcctcgcctttctgtaggaattacctccaggggaagaaggtgcacaggtaacatgggagccagaccctggggtctcttccctcaacttcctctgctggactttgtacacgggaatcatctggcctagagtgtagcactctatcctcagggacagtggttcccagcctcttgttggggaagaagctgcaggaccccctgaacctaagcctgtctggctgagtgctgggctccagctgggccgcactctcctcagattcacagccctgccctggccagtacatctttggagtccatctctgaaaaaatcatccactgcagttaccagaatagctggccttggtaactccctagcccagagactgtcgcaggatgcagtgacagtcttaacctttgtggcatcgggcacatacagaaggcacaactccaaggcaataaaccagccctgcacatactctaaggccttaaggcttgaaagactggctcagttgcttcaccagcctggaggaaagctaagatgctgtggatgccatgaagtgactgcagccatgaagccacatcctgtctggtgactgnataaacttgggatcctgggactactcagagcccctactggatctctacttctcaatgcccatgccaagggcttgngccacattntggacagaagctttgaggagtcaanngggnccagnggtttggaangnnnggncttggggtggttccctttaatttgggagggc

SEQ ID NO: 2241 - DNA, 301 bp, Homo sapiens
  misc_feature (1)...(301): n = A,T,C or G
aagcagctcaagaggcagctggaggangcaccaggaggaggcatnnnngggcacttgctggtcggaggcggctgcagcgggagctggaggacgtcactgagtctgcagaatccatgaaccgggaggtgaccacgctgaggaacaggctccggcgtggcccacttacattcaccacacggactgtgcgccaggtgttccggctggaanagggcgtggcttctgacgaggaagaggctgaaggagctgaacctggctctgcaccangccaggagccggaggctccgccccctgccacacccca

SEQ ID NO: 2242 - DNA, 326 bp, Homo sapiens
gatctctgggagccggttcagagcacatatgccgccactcagaactgtcatctgcccaccctatgtctccttcctggacaggagactatggaggaagatgtgggtcaaattcccttctaccgcaagaccataatcatcatagacccgcatcattggaacactcagaagtccaagttgcatgctttttatctttgctatctcttctcgcctctgtccctgtggacagtgaacacagcatactggagccagtgctttagggagcaaactgaatccatcacttccaattccacattcagcaaaataaaggcaaactggccatagctaca

SEQ ID NO: 2243 - DNA, 304 bp, Homo sapiens
  misc_feature (1)...(304): n = A,T,C or G
caccggcagccttggcatgacgtcgtgaaggtggccattgctaacctgacatgtggggactcaggaaccccaccccttatgggctccangctgngctgctgnccccagntttgnggctctaanangcccttgctgctaccccacatcancctgctgccatccatgtgtgcccnttgntgaaggcctcgntgnnccctgccatgaggatgtgtgccccagttanggggctgttnttgancctggngggantgctgaanacctngccggcntttgcacctntgccttgcttaacctgggaaaatgg

SEQ ID NO: 2244 - DNA, 491 bp, Homo sapiens
  misc_feature (1)...(491): n = A,T,C or G
tgatgcgattgactaaacctactttgttcaccaatattcctgtaacgtgtgaagagaaggacttacctggtgatctctttaaccagttaatgaaagatgatccttcaactgtaaatggtgcagagattttaatgttgggagaaatgttgactttaccccaaaatttcgggaatatatttttgggagagaccttttccagttatatcagtgttcacaatgacagcaatcaagttgtaaaagatatattggtgaaggcggatctgcagacgagttctcagcgtttaaacctttcagcctccaatgctgctgtggctgaacttaaacccgactgctgtattgatgacgtcatacaccatgaagtaaaggaaattgggactcacatgttgganatggntaccggttntcnaaaacttnnggtcatttattaagttcactttcctttttcctctntttggcttttgcataccattantaattatataccttaaata

SEQ ID NO: 2245 - DNA, 345 bp, Homo sapiens
  misc_feature (1)...(345): n = A,T,C or G
gaacacgaactcaaacatgaacaacgatacatattacaaatgttcaaagctgatttgggtagaattggaatacagttgcatacaacatattccagaagaatcagaaaagtcaaagtaatggataacagaaaagagcctccattcttcaatgaagataacgtgggaccattttatttcaaacttcctttctatgacaccatggaactcttcatcgaaacgttgactggaacatgttttgaactaagagtttcaccctttgaagctgttatctctgtgaaaggaaaaattcaaagattggaaggnattagnctttgnacaatatganggattaagcatcttataagt

SEQ ID NO: 2246 - DNA, 392 bp, Homo sapiens
  misc_feature (1)...(392): n = A,T,C or G
gttttgagagattgctacaatttggactcacaagcaagatttactgcaaactttgagatggagtaggtacttttcagatggtggctggctgcccagaaagatgctgtagtgaaactaggagaagntgatttccaggtcatatgtcattagtgtggacgctgctgtcttaagtctgtggccatggcaccagaacacaaagcttgtgcctcttactcagctgtccacggagcctangaagcgcctgggcccaggcaccagccttgctctcagagaagatgtgtctgcaggcagcgtggacctgtgctatcttcctagaacacattgnactcatgtttttaacacttggnttttgattttaaaaattagtatgagtgcttcagatatgaaaacag

SEQ ID NO: 2247 - DNA, 155 bp, Homo sapiens
  misc_feature (1)...(155): n = A,T,C or G
gtacagctcgggactagtcagactctacagcttccaagccatcatcgaacagactnaccacctccactctntgaagtttcatctntggagaacgcattccagatnggaggccatccttgncactacatcatcacgcctaataagaagaaacagaa

SEQ ID NO: 2248 - DNA, 404 bp, Homo sapiens
  misc_feature (1)...(404): n = A,T,C or G
aaagcatgccctgaactgccatcgnatgaagtctgctctcttcagtgtgctctgcgagatcaaggggaagactggtccctgtggccccttgccacaaaccaanggaagngacatgnnnntnactctgnggaccctggccttcctccagccccccactgggggagtctgcctacagcccctggtncatagtaactggcanagggccgccccacagccagcctcatcacctgcgggagagtctggcagcttcaattcngatgctgcatctaattaagtntctggcacctggctgagtgccataagtgactggncctgtggnnccngctgnntaacctnaanaangcccttgctgcggcttttgccctttttcaaggccacttgcctccccaccttggtgtgaaaga

SEQ ID NO: 2249 - DNA, 393 bp, Homo sapiens
  misc_feature (1)...(393): n = A,T,C or G
tatttaatggaaatgaataactccttttgagaaagccatggcgaagttaaacacaaagctcaggggttgttctcgagagtcttcagtatcttctctcctggcaagcggcagcctgagtggcagcagctcccacagctcccacagctcgtttgtgtataaggaccagctgtacagctcggcttccgaggccctgcaggcctatattgatgattttgacctgagcagagaacatcctggtgcaaacgctgtcaaagtgaacactgacggtgagattggtaatgggctgcaattttccagctacgtacatacacccgacaatgcttttgncaatcttgatcccaagcagcactttaacccctttatactatagaagagagactgttaatgacatgg

SEQ ID NO: 2250 - DNA, 283 bp, Homo sapiens
  misc_feature (1)...(283): n = A,T,C or G
tctggtaaaatttacagacaaatcatcaaagctgncgggggananaagagtgcnntntantaggagnaatgtncatttaaaaatagctaattgcatttctgcatgactgggctcctaaaaaagctagttcttagggtccttggagacagtatggagttccagtctcctcctggctgcctgcagaagacagtctcttcctggctgccttcagatcaagatgtaaactcttcggcttctncagcaccatgtcagcctacaggntcnctatgatcataatggacta

SEQ ID NO: 2251 - DNA, 444 bp, Homo sapiens
gaacacaagtccaagcggtcacatggaggccagctggaaactacatctcccagcttcccctgcagcagtggtggccatagcagtggtgacagccagcaccctggtgttgctcctgattccgggggactctgagtgccaggaatggccttcaggaaatgaacctggtcctgccttcactatgccactgacacatcttccagaagataccacaagagggagaaattgaccgatggaggaggagactcagaggtgcaggaagcaagcagaaaatggccttagagtgggcagctgataatgatttagagaaacacaagctacctggccatggcattaagacaatacaatgcaactgctatggatttgataaaaactgattaaattttaatttggttaaattaaaattttaatttgattaaaattaaattttaattaaatacaaaaaaa

SEQ ID NO: 2252 - DNA, 412 bp, Homo sapiens
  misc_feature (1)...(412): n = A,T,C or G
gtgactgtgttttattttcatgncctgtgatacaagagaatactgaggagcagagctccagggctctccaagccagcaggaggagtctgatgctctaaggctagcgctatcaaggagggagcgtctgcgaagagtttcaagacagcatttcatcttatggatttgccatagtccttccaagttgacttatcatgcanntgaagaaatggatgagngaagagannnccaanatggaggagtctcagctatatccaactgcnacatacaaacatatggtaatggcactgtnattctgaaactaangacataaataatgctgngtaataatttaaaaacaaatattcagactaaactataaccactacagagtntacatccataaattacttatgctgnaaatattaactctgtc

SEQ ID NO: 2253 - DNA, 374 bp, Homo sapiens
  misc_feature (1)...(374): n = A,T,C or G
ccgactatgtgacactctgatttnncagncctgacttccccacctgtggaaccgtgaaacgatacgtttgcctaatatgcgaccatgccatacaggcttctncacacnctggcaagttgtacncngcatatcagcaanggctctcnagatgtcntnagacttactnggcttanattangaccacttaccgaaatatgatggtacagnatgcnacaatggcctgaccatacagantcntttanactcatnctntccanggatgacanctgacagatngaataanccacanntcctggnnangaaccggatngcatcngacncaagcagactntttccggtgaatgctgtgcattgnttggacggaaagaacccgg

SEQ ID NO: 2254 - DNA, 362 bp, Homo sapiens
  misc_feature (1)...(362): n = A,T,C or G
gctgtgatgtcacacctgaacacatgacnggcccacaggctgaggaaccggaagctgttctgtgggcaggnggaatgtatgtancctggntgctgntgcgccccatatataaggggaaaccnancnagaggattggnannanggntngggctgcagcctggtgaaagaactggggccttgnnaatgcctgcagataggnggcatggccatggaacaatgcccatggctggctacctccttcatattgtcctgacccctgaaacccaaggacgggtcagactcctgctccanctgaggctgcaggtnttagggggaaaggaatgggggaaacggacaccccaagtgggagcctgagccaaatc

SEQ ID NO: 2255 - DNA, 375 bp, Homo sapiens
  misc_feature (1)...(375): n = A,T,C or G
gcctgcaatgaagagcaatncgtatnttnctgtgttgctctcttnnttaactacnaggaaccagtaccatgttaggggctaccagctgnacaaaagcaggagtangagaagacgggaagacagcaagatgtccaatgatttaccgtgtccaccccaggccaggctcacatcacacaaggcagggtgttagtcacctgcttatgaagccaacgtgtttgcatgaccatgcgtgaggcaagacccgattgggtatgactggaggttgtgtggatttaaaaatcttttaaaatccttaaactcggttcattcaaggtatcctgaggcccacaggaatactctccctctgctttctatcgtgaagggcttgagggaggg

SEQ ID NO: 2256 - DNA, 192 bp, Homo sapiens
  misc_feature (1)...(192): n = A,T,C or G
ccatgcacctgagccatcttccccctctaggctaaggagatntgtgacttggtctggttggaagtcctggtaggaagaaaacattgagcaggtggtaaggaaaggggcatnctgcactgtgcgggaagaccttaatcctacctcaggagaagacatgatgggaatgttctgccctgcatgcaccttgggtgc

SEQ ID NO: 2257 - DNA, 331 bp, Homo sapiens
catcaatagctagctttctcacagtgctagcttggtatccaaatactttgctccggacgtggtgccttgtgcttcatagcttaacactcatgacgaatatgcagcttaattctggttccagcagttctattggaattcaggagactacggctcatctgttggtttcagatccaaaccttattcatgtgttagtgaaatttctttctggtaccagtcctcatgggacgaatcagcatagcccacaggtaataaagtgtttaaatattgatgtatatgttcatacctctcagtaaacagataattaaagtagcctttatgaccaaaaaaaaaa

SEQ ID NO: 2258 - DNA, 391 bp, Homo sapiens
  misc_feature (1)...(391): n = A,T,C or G
agacttcctgcttggtgcgtaccanacggaattcccagagggacccactgagcaactcatgaaagggaagatcacattttcgcaggtgaggggatgctgtgtggacccctgagggaggtcctctgcatcattaatttctgccccatccttcaacaccctgtgggcatgtcctgcaaccccacccccaccccccataactcacaaaatagcaagacactgaaaggtgtgtttagaactgggttgttgtctgtctgggccaacctgagggacttttcaagccttgaggaactgtgacaagaaatcatgacaactagagtggctatttcaggacaggaccactcaattaactcaataactatagaatanggggctttggagtctgggactgagg

SEQ ID NO: 2259 - DNA, 115 bp, Homo sapiens
aaacatctgtggccatcatggaggtggtggaggtggagagtcccctaaatcccagctgtaagtctgcagaaattgatgatctattaaacaataaagatgtccactaaaaaaaaaa

SEQ ID NO: 2260 - DNA, 115 bp, Homo sapiens
  misc_feature (1)...(115): n = A,T,C or G
tttgaggtgctcgatggggntgatgatgcagaggaggaagatgacctaanntggacngtgccactagaggacatgggacagcctacagaggaggaggctgagcagtctggagccc

SEQ ID NO: 2261 - DNA, 400 bp, Homo sapiens
  misc_feature (1)...(400): n = A,T,C or G
aggatgaaccttcttcccgacctgttacaagccaaacagcctcaaagaaaactcttagaacaccagaggcttcagtgatgaatgaagaccctataagcaacttatgcagacccccattaagaagcccaagacttgattcaacataccaaacaaatggaaatactaaaacgaatgaaagaggtttgtttttctctaatccttagaggttttcattgaggattcttagcaacaaaatgcacaagtttttatggcttcagaattttactttgttcattatctcaggtccttagattttattctgtgtaaaattaagtcttattacttgaattacatgtgagactgcataataataaagtacttttgngtgggtctgagggatggacccggggctgacaaaaaa

SEQ ID NO: 2262 - DNA, 217 bp, Homo sapiens
  misc_feature (1)...(217): n = A,T,C or G
cccagggcttctgccactgtagcacgngggnctaactaatgngccaccttgccaatctcnaaggacattaatgggnttctgattgtgtgcnnnctgcaggatcctggatggaccttgtgagtgtggtcagccctctggaggaaaacaacttgctgacagcctcaggctgctggatttccactgcctctctataggaaattttggttaaaaaaaaaaa

SEQ ID NO: 2263 - DNA, 384 bp, Homo sapiens
  misc_feature (1)...(384): n = A,T,C or G
atgatgaaggctcattggacatatatgctgggttggacaagtgctgtttctgacagtactgctagatcctgtgtgtcattcagaaactgtttagatttgtatgaagagatcctgactgaagaaggaactgcgaaggaggcaacgtacaatgacttgcagatagaatatgggaaatgtcagcagcaaatgaaagacctgatgaaaaggtttaaggaaatacagacacagaacttgaacttaanaaatgaaaaccagtctcttaagaagaatatctcagcacttatcaaaactgccagagtggagataaaccgtacggatgaagagataaatcatcttcaccaaagattgtctgagtttccacattttcnaaataaccccaggaga

SEQ ID NO: 2264 - DNA, 184 bp, Homo sapiens
  misc_feature (1)...(184): n = A,T,C or G
gactatccattctccgtgttgatgggcatngtcatggctcgagctgagcctaccctgaatgaggctgttttactcttccggaggttgccaggtccaacaatgcacgtgctaccaagcaggaggcgctgggtgcaggtccagctatgctgcagaactctgcgcatgcctgggagagaaaaaaaaa

SEQ ID NO: 2265 - DNA, 224 bp, Homo sapiens
  misc_feature (1)...(224): n = A,T,C or G
gtctccaaagaaaacagaagaggacatgggattccctggaactgatggacaaatgatgtgagcggtcctgtgggcaatggaaattgagctcagtcctctgcaganctgccagcgctatcaccgagccattcattccttcannttcttctttctgggnttnanttnccaaangncntttnctggtggctttnagggcntanttttaaagggttgggttggttcta

SEQ ID NO: 2266 - DNA, 405 bp, Homo sapiens
tgctaaatgaagccaagaaagttgataatggcaacaaagcaacagaagacgactctcctcctggcaagaagatgcgcacgtgccagagaaaagggcctatggctggagggaaggacgcagacaggacaaaagacaatcgagactctgtgaagaccttgctgttaaagggcaaagcccctgtggacccagagtgtgcagccaaggtgggaaaggctcatgtgtattgtgaaggagatgatgtctatgatgtcatgctaaatcaaaccaatctccagttcaacaacaacaagtactaccttattcagctgttagaagatgatgcccagaggaacttcagtgtttggatgaggtggggccgagttggaaagacggggcagcacagcttggtgacttgttctggtgacc

SEQ ID NO: 2267 - DNA, 229 bp, Homo sapiens
  misc_feature (1)...(229): n = A,T,C or G
ggcatgaatggattgcgctcanatttaccaaanntgaatgccaacatgaagactgtnancctagncctgaagatnatgattngtatggaaggggacccccanaaccctnacaaactgcacattgtcacaagaatagtgaagtacataagaggcgtccatactgggaaaangataccatcccgatgcttggantacagaangcacacagccctcagaatcacaagaacat

SEQ ID NO: 2268 - DNA, 294 bp, Homo sapiens
tggtgggaaggacagctgttacaacatgatgcagtgcattgctgaggggcatcaaattgttgcattagcaaatctaagaccagatgaaaaccaagtggagtcagatgaactggatagctatatgtatcagacagtgggtcaccatgccattgacttgtatgctgaagcaatggcgctgcccctgtatcgcatagccatcagaggaaggagcttggagacaggaagagtttatacgcaatgtgaaggtgacgaggttgaagatctctatgaactgttgaaacttgttaaggaaaa

SEQ ID NO: 2269 - DNA, 317 bp, Homo sapiens
  misc_feature (1)...(317): n = A,T,C or G
gcttgttttgatccacctcttgaaatggatcctaccgggaacccaatcatacacaacaaaaaggcagccgacccagtccatcctgaccttgccagcatgttggtgaaaaacaagactcttttagctgaggtatatagcttttacaaaaactgaaagtggnaattanatcttctgaaaggttagganaganagagggagtnttgntancggttanaggcgttatntnanccnantttngncccaacccaanncnnaattttttctttannggggagttnaaatcccggctgngcnttancacttctacatgggaaata

SEQ ID NO: 2270 - DNA, 327 bp, Homo sapiens
caactgaggaagtggagaagcttctcgattggaagccgctgccgtcaatcatatgccgagcgggccggacttcccgacaagccctccagagtctctctgctgccggagcaagctcagctgtcccggggaccacagattggaagcaggcagtcactggtcttggacaggaagactctctccggccttctcagctgtggtcctctaacctgtgcctgtgagccaccaagagtgaacggaaactagaagcattgccaccaacaactggagcagtgaccacactgaagtttctctggcgaggggaaaggggagtcaggaggaaaaaaaaaa

SEQ ID NO: 2271 - DNA, 418 bp, Homo sapiens
  misc_feature (1)...(418): n = A,T,C or G
acagggtctcagtatgtatctctgtctggcctggaactccccgtgtagaccacactgacctcaaactcacggagatctgcctcccaaaaactggaagcaaaggcatacagcaccatactcagcaagacttcaactttgcatctttcatggataaagcacccagaaatccctgtggctgattaattcctgtttcattgatttaagattggacagaggcgacatgtcagacgagacagtcagcagatcacagttctccttgaagacgtacgcagttagagtgtttgctctccctgtgtcttggtattattctctctcccagatcaaattttcaccagtagctaagaagctgttcatggnaactgccgtgagtgctgngtctgggattttctggcccatcactttaaaagaagacggggga

SEQ ID NO: 2272 - DNA, 383 bp, Homo sapiens
  misc_feature (1)...(383): n = A,T,C or G
aagactgagatctctgcctggcagattaactaacgacaaggaagactggccttacctccattcccagtgctgccctttacaagacctctgcaacagactgtagcccaagcccccttgctgccctgtttaccccagacatctttctggggtccacttgaagtcagcagcttgaagatgagcagcaccctcttagcatgacgaccttggaccatgtcattgccacccaccagtcagagtgggtctccttcagtgaagagccattgttccccacccctttagaggggggcactgaagagcacttcccaggactgtcatcttcctcanagcggtctgagagctcctctggggagaaccatgtcgtggatgaaggctcccaggacctt

SEQ ID NO: 2273 - DNA, 165 bp, Homo sapiens
  misc_feature (1)...(165): n = A,T,C or G
gatttccacaggctatacangagaaaccctgtntcnaaaaaccaccgaaaacgatagctgagancngnngtaacactcatcttnaatccaagtacttaggaggtaaagacagaaagttcttctgctacacagagttcaaggccagcctgggctacaagaaactca

SEQ ID NO: 2274 - DNA, 298 bp, Homo sapiens
ttgacacactgagcctagcaaagctggctatgaccatccgccgcttaagcggagccacctgctgtgctgctcctttgatgtgccactacctgcccgaggcccaacctgcctgaggcagaacctgttgtcttccaagattttctggagttagcaccgaactgcaatcttcacgagttcccactaaaagactgacctatctacttcaaagaaactttgcatggctaggtatgggcctcccctcttctttataaagcgtgtttgctgacattaaaattgaactttgatcagaaaaaaaaaa

SEQ ID NO: 2275 - DNA, 423 bp, Homo sapiens
agctcctgaagttctgccattccccgtggtctgcagttcaggaagcttctggaacatgcggcgcctctgccatggaaacaagatccgcgtcgtcagcttcagatgtgttcttggaacactgagttcgccttggcagctgtccgaaagttaatcctgtgaagggacctgaagcagccctctgaggaagcctcgcgcacccctgccgaagaacatcgcagtgtgttcattccccttccgttggcctcaggatccaagcaggaaagaagagggaagaactctgaaggacatgagagggacccagcttacagtccagggttcccagactgccctttgagaataaaataggaggccagaatcaaagtcttttggataaaacaccgcgactgaccacacactaacccatttggctgcccttctttccaa

SEQ ID NO: 2276 - DNA, 280 bp, Homo sapiens
cttgcagacccttatcgacgtggtgctgtctcaacactaacttggatctgaatctccctgagtgctggagtcagttctcccaagcggtggagttctaccttgcatctcctaccaggaccgcttagtaatagctgtctgctggctcagcgtctagttcatttcatactttccagatcactgtgttttagcagcagccggcgttgcatcctcgggcagtatgagagcctgtcagcagggaagaagttccagtttggtttctccatatatggcacccaaggtg

SEQ ID NO: 2277 - DNA, 193 bp, Homo sapiens
gcaaagaacagaagcagaccaacatcgaatccatgaaaatggagggctcccggggccgactgcgaggtggcttgggctgggagtccagcctccgtcagcgacccatgccaagactcaccttccaggcaggggacccctactacatcagcaaacggaaacgggatgagtggctggcacgttggaaaagggaggc

SEQ ID NO: 2278 - DNA, 242 bp, Homo sapiens
  misc_feature (1)...(242): n = A,T,C or G
gcaccagacctgttgctgtcaagatggagcagcacactagtaaccctactaaggaaaaaggngctgnggaaaatcccnngggatgcctttgagcnctaagantgcttgnntgccnaccttgatcttcnaacccatnttgctcnacgncanatnttnatnatcgnaaaccttgctggcttccctntcacagnngggttctgggaggtagagcntgaactgttcttnccttggcttatgtccgc

SEQ ID NO: 2279 - DNA, 340 bp, Homo sapiens
  misc_feature (1)...(340): n = A,T,C or G
ggtgtctttctgtgccgaacatgctngaagaaatgccctagcacttcatgnnnatangtagaagagcaacccnggccctatgggtggaaaccntnttgtgccagttgagctcatangctactcanagctgagatagnagacccntagantaggagcttgaancgctcgnctctggcatganggagtcgatgnagntgaacnagnggctttantatgagaganttgctagnnagtgcgcagtcattgacattgatcagtttaaaagactccaacacntngtcaaagagaacanncggngatttntacactttnnnaaagaggaggacgaggctttaagtag

SEQ ID NO: 2280 - DNA, 375 bp, Homo sapiens
  misc_feature (1)...(375): n = A,T,C or G
atgacatcatctgccccatcttgtggcctaatncacgctntaccctcctgagccgtgtttacnagtcctattatggnacgggaccaggccaatncctttaccacttacagantgtangaancaactgtcaccnangtggcttnnnangangggagggagtagaactgactgtccctttgggccctgacaagtgaaatcaccttncattggtttgggctggaaactcatggntggagcacaggaagtgggcttngngtcactttggcctgtcacttanatggccttggctctagcttcactcccaaagttctactggatgtctgatgcacaaattcanagctttcgggncctgaatnccggtataacatgacaccc

SEQ ID NO: 2281 - DNA, 172 bp, Homo sapiens
  misc_feature (1)...(172): n = A,T,C or G
tgcatagcatggactaagttgcccagangtttagtacttgctcccaccgggcncatgctgnnnatgacatcatctgccccatcttgtggcctaatccacgctgtaccctnctganccgntnccaccgncctattatnngnngngaccaggccaatccctttaccacttacag

SEQ ID NO: 2282 - DNA, 112 bp, Homo sapiens
tttgtcccaacagatgggattgaagaaggcctctcaggcagattttaactctgactactctggagataagagcgaggcaacagaaaactaataaagatttgtatttgactta

SEQ ID NO: 2283 - DNA, 250 bp, Homo sapiens
  misc_feature (1)...(250): n = A,T,C or G
ggttggtgcaggaaatattaanaaaatgaacccaccaactctctgtgnggccgaaccacactcccgcgctcctgccagcacgcggcaactctctccagctagcccctgcagcatctggctcgcttgncccgggagccactagttccctctctgctataatcccctgtaattggtgatcccatattccagtaaccaaatggaaccaccaacctcgaggttgcatattacaatacacagtaacccggtaaaa

SEQ ID NO: 2284 - DNA, 615 bp, Homo sapiens
  misc_feature (1)...(615): n = A,T,C or G
gtaattgtggatcgcctcttacatnccttgggnggtcganccggaanagcnctttcacnggaagtnccctngaaanaccggtacccttnaattgnggcttnggcctccgcaaaccnaagacccttttactttgtnacggcaaaaggtttnccgggtccaaancanctantagatttnccccggtaacacgtnggcanctaatatttggaaatcgcntctttttnaaattgcntngtctttttaaacggccattgnggttngaccnaacccctttacnttttaatcnggccttntacattaaccccgggntgggtnggcnttccaaaccccttgggcgatttcnaancccttggggcncccccttggttcngggaaaacttggcttgccactaatttaaatccggcacgcctggctttntcctcatcngcctccatagtngataagcctncaagagttacaaccagagtggcctggaagccggacgatctttgggttctggccagcttattntgctagcgagcttgnggntggcctacaagataacntgnataacccagngttcagaggcatntgcctgnatnaggccacaggcctntgaaggaccttggccatgg

SEQ ID NO: 2285 - DNA, 343 bp, Homo sapiens
  misc_feature (1)...(343): n = A,T,C or G
accatccacacatgattgaatcattaataatctacatgattactnctcgtctgcaaaattaagcagttctgagaagtcaagcaactcactgtcttctcctttcatcttccgtttcctgatcttaccagtgcatcgggtcaggtggtcatatatgcttagcagaactgcaggacactggacatactatggaggcctcagcctctttctctcctgctcccttgctgtggagtaacttcatccatcacgctgtcctagtggcttcttcagattatcaaagttccaataatcgnctctaggggacatgtctctaaatnccattcagaagtttagcataatttttagt

SEQ ID NO: 2286 - DNA, 266 bp, Homo sapiens
  misc_feature (1)...(266): n = A,T,C or G
ctctgatcccgcttgctgttcctactgacacctgagccgcggtggcgatgctgctgaggcccttccagcccacgagtcaacctacttggtaggagtgtcttttancctcaaggntnctcaagtgcangaagagagtgatctagaaatgtaattgaaaatagaatagcatgaaagatattaatgtctttgaatatttattctcagtgtattttaatatattgataataattaaaggtctgtgagtttaaccagtgttttaggatata

SEQ ID NO: 2287 - DNA, 412 bp, Homo sapiens
gactgaggtccggatggcgagggggcacaggagctctcgatgtgacctggcgctgtggatgtgatgcacagcagcttgagtgggactgctccgctgtcctcatgagagaacgctttttctgaagatgggaggtggctaatgaaagaaggaattgtgttctcggtgatgcctggaagagatgcgtgacgttggaagatgattacgaaatacaggaaaggaatgaaatcaaaggatgttttttgtaagagtaacacttacagaaatattcattaatttgaagatttatataaggcctggtgacctccgttaattcctgggacccacagtgtggaagaagagacctgactcctgaaagttgtcttctgaccacatatacacaatatgtaaataaatgtaattaaaaaaaatcaaa

SEQ ID NO: 2288 - DNA, 329 bp, Homo sapiens
  misc_feature (1)...(329): n = A,T,C or G
tcaatgctagaaggtgaaggaaagccactcaacccagactcagtcaggggaacctctctggaaccatacttctgaaaacctggatgccaatgacattttttgtggagataagattcaagtacagaaaataaaagtgcataggcctgttgaaataccagctctactaaaagcagcacttaattctaagaaatggggctttcttatatgctttacacattttctattatcaaagttttatatgttgtctctataacttctgtgattgttgaatttgtaattnttatacctaaaacttaaaataaattcacacaatttctgtaaaaaaaaaa

SEQ ID NO: 2289 - DNA, 218 bp, Homo sapiens
caagccatctctccagcctgagagtgcgtgttcttatcatgagaagacaaacagcagtggagttggcaagctgcctcagtgggattctgatgcttcatgacatgccatcatgtagagcaataatgaacactggcctattttggactagccgacaaccctcagaaatgataccgtaataacctaccgcagggaagctgagctcgagtcctcatgactat

SEQ ID NO: 2290 - DNA, 432 bp, Homo sapiens
  misc_feature (1)...(432): n = A,T,C or G
ggacaagttgcttcctgaaggatccatgtgtattgttcaaaacacaagcttaaaaagagtgcctgcagacagatggcccacatcttcgtgtatggcaccctgaagcgcggccaacccaaccacaaagtcatgctggaccattcacatggcttagcagccttccgaggccgaggctgcacagttgagtccttcccactggtgattgcaggcgagcacaacataccttggctgctgtacctaccaggcaagggccactgtgtgacaggtgagatctacnaggagnacgancacatgntgngtttcctggatgactttgaanactgncccagnatgnnccagcgcacanncctgnaggtgcatgngctngagtgngagggtgacagtgaccctggtgacaagtgttgagntctttgngtacactacagcctccta

SEQ ID NO: 2291 - DNA, 340 bp, Homo sapiens
ctgaggcccttttagctacccattactggaccagaaagatgacatctatcatcaagttaaccaccctctctggggttcaagaagagtccgctctttgctatcttctccaggttgatgagtttaggtttttgttggactgtggctgggatgaacacttctctgtggacattattgattccctgaggaagcatgttcaccagatcgatgcagtgctcctgtctcatcctgatccactccacctcggtgccctcccattcgccgtggggaagctgggtctaaactgtgccatctatgcaacaattcctgtgtataaaatgggccagatgttcatgtacgacct

SEQ ID NO: 2292 - DNA, 134 bp, Homo sapiens
  misc_feature (1)...(134): n = A,T,C or G
caggatttctctgcctctgccnaccttnggttccntgnccctnagagnaactancctggagncacttctctggtgacaccnactcaaanagaacacttctgattaaaacntgtggaacccacagatggacaggt

SEQ ID NO: 2293 - DNA, 390 bp, Homo sapiens
  misc_feature (1)...(390): n = A,T,C or G
gactgagcttgcccggggtgcaaatggaagatttaagtcccgttctggacacaaaatcaactctgtgagtggtgactgtcagctgccggcttcaccaatgccttctcaaagcatgtctgtggaagaaacagcaagaaaactgctgtctaacttaagggaaattcttctatactttgttcccgagtttcanctatcatcanaatttgagngcacatctgnggaagaactcataacaaatcctgagctggagcgatgcccaaagaatatanacgaaangctaaaaacgtgttncaaccagatccagaatatctacatggctcagtatganaaaagactcnngaggaaaatgcagtccattgtctatgangcaacacagaaggggcttactca

SEQ ID NO: 2294 - DNA, 149 bp, Homo sapiens
  misc_feature (1)...(149): n = A,T,C or G
gacgtgtcaaaaagtggagaangnncatgccttcaaagcccaccgtgctnagctgnccgntantagctcttacttccgggacctcttcaacagcagccgcagtgctgtggtagaactgccggccgctgtgcagccacagtcattccagc

SEQ ID NO: 2295 - DNA, 128 bp, Homo sapiens
gcccttctcgaagccacaaaaatctggaacctggtgtcctggccatgtgctgaatgcacgcacagcacagctctggtatctgttttaaattatccattaaaataagtacagtcctggaaaaaaaaaaa

SEQ ID NO: 2296 - DNA, 108 bp, Homo sapiens
  misc_feature (1)...(108): n = A,T,C or G
gcccatcttgcacagtccgtagaccatgacttttacgtggatatngaccgcaaagaggagagcttctncgagncgnagggctccntngatgctctgtgtacacacctg

SEQ ID NO: 2297 - DNA, 197 bp, Homo sapiens
  misc_feature (1)...(197): n = A,T,C or G
ttatacaacgccgtgactggnaaaaccctgtacgttacccaacanaatgagcttgcgaacacatancnntttngccagctgncgtaatagcgaataggctgaagaaaattngancccatagagggntgcgccanttttggggccttcctgttcgcgggccagcacaccatgaccactggccgcaggggcccgaactg

SEQ ID NO: 2298 - DNA, 163 bp, Homo sapiens
ttgatgatacaaggggaagtaataatgacaactaccaaggagatttggagcccagcttagagacacctgtttgttcttcctattatgaaaatagcccggaggagcccgagtgtcatgatgacaattcccaggaagatgaagggtttatgggcatgtcccatgt

SEQ ID NO: 2299 - DNA, 324 bp, Homo sapiens
  misc_feature (1)...(324): n = A,T,C or G
gatgaaaaagcatttgtaactatgaattgactacagttttcttcttcctcctttcctgnaattctgtntctttccttttgttccttccttgcttgagagactcaaagcacccgngactctgntnccccatttacccccttttgaatttgcactaagtcnattgcactggtttggagtcccggagatagctttgagtctctccgtatgaatgtatacagcgagtgtgtaaacctctttggcaatgctgccccagtacccacctgtcgtccatctccgtctgagggcaactgggtgtggccgngtgcttgaggcctcgccttccct

SEQ ID NO: 2300 - DNA, 174 bp, Homo sapiens
ggccctcataatcgagaatatcgatgaggacttcagggaccagaggaagccgggaaaagaggcccatggcgtcgagcccagccctgaccgccagctggctgaggtcgtgccctgctgggctgccctccaatgtgcctcacgcaataaagaattctccctctgcaaaaaaaaaaa

SEQ ID NO: 2301 - DNA, 109 bp, Homo sapiens
cgggaagagcacacccagcccaaacctagatttggatctcgtccggaagcagttatccagagccggtatcctcgctcagagaacagccaccgattttaaagcccaggcc

SEQ ID NO: 2302 - DNA, 416 bp, Homo sapiens
tgagataaaaatctggacaatgccgcagaagcagctgagcagtttaaattaatccaagctgcatatgacgtcttaagtgaccctcaggaaagagcgtggtacgataaccaccgagaggccttacttaaaggagggctcgatggggaatatcaagatgacagcttagatctgcttcattatttcacggttacctgttattctggttatggggacgatgaaagggggttctatgcagtgtatcgtgttgtctttgagctgattgcaaaagaagaactggagtgtatgtcagagggagatgttgaggattttccaaccttcggcgactcccagagcgactatgacacggtggtccaccctttctacgctcactggcagaattttctgcacacaaaaagaaattttcctggaaggaaagt

SEQ ID NO: 2303 - DNA, 180 bp, Homo sapiens
  misc_feature (1)...(180): n = A,T,C or G
taatctcacagactattctaaacttntangngcatttattgcngncgaaaagcaanagggagtanctgcggaagtggnagaagactncaacatcaaagngattatctgcactctacttggagtgaaagggacacanagggaccatgaagcgntncttgtccagattctctcaaaatctca

SEQ ID NO: 2304 - DNA, 405 bp, Homo sapiens
  misc_feature (1)...(405): n = A,T,C or G
gttaacatttctgagctgtgttcccgagatgcttgattgacccttgaagttatgtggacagagattctcacgtgtgtctattttaaccaccggacccagcattgtatcttaatgttcacataagtcagaactttcataagaaagagaatgggagtctggttaaacaaagatgactttatcagagacttgaagaggatcagtctctgtcttctgatactgtacgtggtcgttgtggtgggcacagatcagaatttttacagtttacttggagtgtcgaaaactgcaagcagtagagaaataagacaagcctttaagaaattagcactgaagttacatcctgataaaaacccgaataacccaaatgcacatggngantttttaaaaatnaattggaccttatgaggc

SEQ ID NO: 2305 - DNA, 255 bp, Homo sapiens
  misc_feature (1)...(255): n = A,T,C or G
gaaatcatttcaaaaaatttcccaatcagattctgaggagtgggaatctttgaaagacttgagaagtcagcttgaacatttaagatctgagcactcatttctaagtaaacttactggcttcaatataagaaactattccaagatggaagacattgtaaacactgaagagacagaaaaagatacaaagaaagttctacagaaacacagatnatcaggaaattgcaacntggcgacnttncaactggaatttgaggg

SEQ ID NO: 2306 - DNA, 495 bp, Homo sapiens
  misc_feature (1)...(495): n = A,T,C or G
acctctccccagaggagcagtggagggtngaacatgctcgaatgcatgccaaacatcgtggncacnaagccatgcacgctgaaatggtcctcatcctcattgctaccttggtggtggcccagctgctcctggtacagtgnaaacagangcatccccgttcttacaatatggngaccctctttcanatgtgggttgttcccctctatttcacagtgaagctgcattggtggaggttcttggngatctggatcttcttctntgctgtcacagcctttgtcaccttccgagccacaaggaagcctctagtacagacaaccccaaggttgggnnataaatggtntctgctgatctataaaatcagctatgccactggcattgatggctacatggctgncatgtttaccctctttggtcttaacttattattcaagattaaaccagaagatgcaatggactttggcattnctcttctnttctatggcctctactatggag

SEQ ID NO: 2307 - DNA, 216 bp, Homo sapiens
  misc_feature (1)...(216): n = A,T,C or G
cggtttctcagcgactatggcctgcagtgggtgggcgagcccatggaccaggagaactcanaggaaaagacagtctctgaaaatgatgagcgagactggatgaaggccaagaagttttggaagccaggtnaagcntntgccctggcccccacctaccanctncctgagggcctgccantcttccanaggcccattgnttgaacccctgacatccca

SEQ ID NO: 2308 - DNA, 222 bp, Homo sapiens
  misc_feature (1)...(222): n = A,T,C or G
ggagcccaaagtcctgccctntnaggacccagctactttgcctncatctacctctnncttggtgattccctccctgcctcacatctggggcccattagcaccctctttcctggttggtggaaagtgcaagaagatgggaggcatacctggtgctcaacacgcagtaggccttcaataaaagccacttgcattagcattttatacttcacttaaaaaaaaaaa

SEQ ID NO: 2309 - DNA, 290 bp, Homo sapiens
  misc_feature (1)...(290): n = A,T,C or G
gcccaacacagagatactttcattgaagaacgctatggaaaatataacatcagtgaccctctaatggctcttcagagagattttgaaacactgaaggagaaaaatgatagtgagaagcagccagtgtgcacaaaccccctctctgtcctcaaggcggtgatgaagcagtgcaagaacatgcaggagcgcatgctgtcccagctggccgcagccgagagcaggcaccgcaaggtgatccttcgacctttgagaaaaaaggacagagncttgcccaggacactgttgaagga

SEQ ID NO: 2310 - DNA, 310 bp, Homo sapiens
  misc_feature (1)...(310): n = A,T,C or G
gtgctcctcccagacaagtgctcctnccggtaaagttattcttcccctgcagattaatctttctccactcgcctaaccntgngggagaagggggtctaaagtctttctgtctactgtccctctgactcaggtgcctcagttacgctccaaagtggtgaatgggttaggatttctattccgtangaggctnttgcctttttggnggnttgntnnctnatattnataatccnatttggaaagctgacacaagaangttattgtgagtttgaggccagcctgngctacagaataagaacctttctcatataga

SEQ ID NO: 2311 - DNA, 373 bp, Homo sapiens
  misc_feature (1)...(373): n = A,T,C or G
atcaattaaaagaagaatgagctgtaatccctgaagataaaactggacagctttttcatttagtatatgtatatttttaattataaaagttcaggtggagtcttcagtttatcagtactgagcagcagatcaccattttcagggacgatacctgcctcttcttttttggtgttcttggcaaaaattaaacccattgcgtcattgtaannnangnangggngtaaattcaggatacaagtcatggaataaacttcccacatgctttgcttaaaaaacaaaaccaaccaaactcaaccattacaccgaactttggacttcttgaattgagctttattttaatataaatacctgaagtgattttctcagaaaaaaa

SEQ ID NO: 2312 - DNA, 421 bp, Homo sapiens
ggctgtgatctcctcctcgtagcgcctccggttctcggggtccgtgatctccgcggcgtactcggagaacattcggcggaactctgggtcctgaaaggcggaggtgaaccgctgcacctcctctctgctcagatccaagtcctccagcgctaaggaggccgccgccttggccatggtgacccacacggcccaatgcccagacccagtgaaggatcagggtgaattgagtgtctaggatgcgcttcagagtctggctcatggagaactgaccagtccaagaaggccttcctctgttacattttaagtagactgtcccaagattgggatgacacctcatctccgttatgccatctctttcacatgctaaatatatgtactcaactaccatggtgactctgagttcaaggccagcctggtctgc

SEQ ID NO: 2313 - DNA, 428 bp, Homo sapiens
ttatcttcacctgttgtgtgaagcatagcacctttcaagccactgtagaaatggacaaagaagaaaggaagactatcaacaagggtcaagaagatgaaatggagatacatggctataacttatgccgctggaagcttgccatggtttttgtaggagtgatttgtactggtggttttctcctcctcctcctctactggctgcctgagtggcgagtgaaagccacatgtgttagagctgcagttaaagacagtgaagtggtgcttctcaggacaactgatgaatttagagtatggttttgtgcaaaaattcactttcttcctgtggagaatcaaccaaatttgaatgcaaaatgtttagttaatgaggtttctaatggccatgctgttcatctgactgaagaaaatagatgcgagatgaataaatctcac

SEQ ID NO: 2314 - DNA, 324 bp, Homo sapiens
tggttccctaaggcagccgtttcttgccggccctgggagtctgctatggcgttccctcacctacaacagcctagtttccttctgtgtacccctctggagacagctggtgtgaccggtgacctgcaccatcagatttatttttctaagagggctcttgcaatccctacttgtttagaggtggtcagctggcccaagtcttcagattgaacgactagcatctcctgatctctatttggccagaggccacttctccatggagtcggtgttgtgcccacatcccaagacttttaataaatctccttggtttctgttcaaaaaaaaaaa

SEQ ID NO: 2315 - DNA, 255 bp, Homo sapiens
gccctgagagctgaagttgggagaactgcttcatgataaagctgtttggtctttttgaagccatgtctgctattgaaatgatggatcctaagatggatgccggtatgatcgggaaccaagtgaatagaaaagttctcaattttgaacaagctatcaaggatggcaccattaaaattaaagacctcagcctgcctgaactgataggaataatggacacctgtttctgctgtttggtaagaaataaaataagactgt

SEQ ID NO: 2316 - DNA, 557 bp, Homo sapiens
  misc_feature (1)...(557): n = A,T,C or G
atcccaagatggctgggcntaaacttgctctaanaaccattgattggntatcttttgnggaggtcatgccccnaaaccagaaggcaattggaaatgccctganntcctggaatgagaccttccacgccaggttgnctagtctgnctganaaaccacctgcgattgactgggcttactacagggccaatgtggccaagcctggcttggnggatgattntgaaaagaagtataatgccctgaanattcctgtgcctgaggataaatacacagncctggnggaccaggagganaangangatgtnaanagctgtgctgagtttgagtctggatcccagctcangatccangattatgagaancagntggagaanatgacgaacataattccctttgaccanatgaccnttgatgacttgaatgagatcttcccagaaaccaagctggacaaaaagaagtacccgtactggccccaccagcccatcgagaacctgtgaagcagcctgggacggagccccggccgacatgaaataaaacatttaaatagtgaaaaaaaaaaa

SEQ ID NO: 2317 - DNA, 247 bp, Homo sapiens
  misc_feature (1)...(247): n = A,T,C or G
gtcccagcccagatccaaggaacgagcatgcccagaatacctgagctctgagcgtagtgcggcccagcagcgtgcgtcggtttgaaagctcggctccaacccagcggacttcagaagcagccggtggcgcagttccccgccccctcagccctgtatcnnacccanancctgangctgcnntnttaccnnnagggntctgtgngcanncnnttantnccactttcatactggaatgtgcaggcagaaa

SEQ ID NO: 2318 - DNA, 234 bp, Homo sapiens
  misc_feature (1)...(234): n = A,T,C or G
aagaggttgggaggatcatgtatggctatgaaaagacttacctgagagatgagcnctttctgcagcgccntcctctnntgcaggcgangatganagcagttcttctggatnggctgatggaggtgngcgaagtctatnngctcngcagagagacgatctactngggacaggacntcnttgatcgttncatggctcacancagaatatcataaaaacacttttacagcttaaaaa

SEQ ID NO: 2319 - DNA, 489 bp, Homo sapiens
  misc_feature (1)...(489): n = A,T,C or G
aagcctgaccagacttggaactgaagcaccttaaggacaaaagaaagacttgctgagctcgctcacagaccttctagagcagcgctgggctcatggatctggagattatggacagaagataatgtagatgttataaccaggccagcgtcctgtggtaaagggtgtctttagatcactgtttcgtcggtataggtaaatgacatgaagaacatctttataggcaggggatgagaatctgagatgaagaaaagaggctcccctgatggaccattctaagctactgtcagaagcaggatccatagaacttaaggacatgattgcaccaattatcagacattggccctcttaaggtcatgggtggatccttttaagaattttgggcttttctngctggncctttcataaaanggnaaccctcaattttttaagccttcctatttggaaggatttttaaaaanccatctncaataagtaaattttcctcatttt

SEQ ID NO: 2320 - DNA, 390 bp, Homo sapiens
atgcgagctacacctctggctgcttctgctgatgtttcctgcaggaagaaaccgttggagtttgatgacaatattgatgccaagtgtccagtcctaaaacgagtgagagatgagcctgagcccggaccactccccagcctgctgccccccagcccacctcccgcctcagacttgtcacctgctgtggcccctgcaactcgactggggccttatatccttttggaacgagagcaaggcagctgcagctatcgagccctgcactgccccacaggcacagagtacacctgcaaggtgtaccccgccagcgaggcccaggcggtgctggcaccttatgcccggctgcctacacaccagcattgtggccccgttccacagaggtcctgctgggct

SEQ ID NO: 2321 - DNA, 900 bp, Homo sapiens
  misc_feature (1)...(900): n = A,T,C or G
gcttctggtctgtggcaggcaagagaattctgcccctgaggcatggccggaagacagaactagctgagtgcttcagtctgcagaagtctttcaggattcagctgaggtgggcctcagtcggcagacaagatgctcctggctctgggactcacgctggtgctctatgcaagcctccaggctgaggaaaactccttcaccatcaacagcatccatatggaaagcctgccatcatgggaggtgatgaatgggcagcaactgaccctggagtgccttgtggacatcagcaccacctcgaaaagcaggtctcagcaccgggtgctgttctataaggacgatgcgatggtgtataacgtcacctccagggagcacaccgagagctacgtcattcctcaagctcgggtcttccactccgggaagtacaaatgcacagtgatgctgaacaacaaggaaaaaaccacgattgagtacgaggtgaaggtgcatggtgagtccgcaagcagaatagcaggttgatgatgatgctcacgttggtgacgctggtcacgccgctcatggtgacgccagaaaccggncagtgaaactggnttccttctccgctaactncacctttcctggtcactacctggcatcctgacctgaaactgtaggctttaaaaacttcccgcttgtgtgnaanacaggactttcttccctttggggaatgaagtccctgggcctttgggnaaccacccctttccttnaatcccttcccttaaagtaaattnggacttaccattttttccccaaaaaccccccntttttttttttgnaaacaggnntttcccctttaaaaagcccccngggnccaangggcctttttaaaanncnttnccnttgggggncaattggccccccttgggg

SEQ ID NO: 2322 - DNA, 263 bp, Homo sapiens
tgtgctggagaagagaaacgagttggtacacgcacagtgtttgttggcaatcatcccatttctggaacagaaccttatattgcgcaaagattttgtgataatagaatagtctcatctaagtatacactttggaatttcctccctaagaatttgtttgaacagtttagaagaattgcgaatttttatttcctcatcattttccttgtacaggtcacagtagacacaccaaccagcccagttaccagtggacttccacttttttt

SEQ ID NO: 2323 - DNA, 182 bp, Homo sapiens
gtggcacaagacttgaaattgctttgaaggtgaggacatcccctcccccaccgccagccacccctcctcttacgtctgtaccttgaaagctgctgctgctgcttacagaattatatttttttcttttgaagagttttaagaagttgtaactttttgtgtcttgtcatgtaaaaaataaataa

SEQ ID NO: 2324 - DNA, 868 bp, Homo sapiens
  misc_feature (1)...(868): n = A,T,C or G
gaggaggacttacataccaagcggctctccatgcctccggtgcgctctgggcactctctcccgcactttgccaaagtcgttttttctgtcgcgatgtgtttctgcgaacactggggcatcctctaggatccaccagcccccacttttggttctcaggtgcagtcaactgggagtcctgcttcccttctttgaccacttcggcccctcctgaacacggtcccctgtcttcaatccaaatccaaagaacagagtatagccagagttactcattgaatgacacctaaaacttagaccgctgtccccagtggaccccagagttgccacccagggccgttttgcattcacgcacacgcttcaatgtacagagtcgctgtgtgttcaggcacctgactctcactccatccatcacctctaccaggaaagtctttctgccataaggaaataaagaaactatggtccatttgtagtaagaggcgcgtttaaagctcatcggtggattacaggaaattaggaggattgggcccttggattccctagccggcagcaggttctttcttgcctaacatttattaatttatcattgggttgaaacgttgcagctgttaacatgactaacataaaaggagaggatctgactccaggatatatgtcaaagagctttgcatnctgcaccggatagganaagggaanttggagaaaagggtaaatgcctataagaatggaatnctcctggannaactcantaagngnggaattttgggaacnagggaaaatgccgaanggggtnattaaaacctaattttatacccaaactgcatngancagccggtttttgcctttttttttaggttggacacccaacttttcc

SEQ ID NO: 2325 - DNA, 118 bp, Homo sapiens
ggggagctccttgtatttgtttcccagggagtgattagctcttaaggagtgaaatatggagttgtacaggaacactaaacgatgtaaaataaatgactgaagagtggaaaaaaaaaaa

SEQ ID NO: 2326 - DNA, 276 bp, Homo sapiens
  misc_feature (1)...(276): n = A,T,C or G
ctgacaggtaccgcctgaagnatggttggaagnatatatagtntgggcnagggctgaagcanacngannctctaaacaatcagncctnggagctggaacncctgattgactcngcctgaacgaaagatggactggtangcatggccatcgttggtggcatggccctgggcgtggnatgcctggctggactcattgnactggctgtatncaagtccanatcctgaangnagnctcacctgctctctgcccggnacgcctatgacctgggggacactg

SEQ ID NO: 2327 - DNA, 391 bp, Homo sapiens
  misc_feature (1)...(391): n = A,T,C or G
tctgactatccggaactaaggttcaangctaccgatggagcgacttccccacagcagccctgctgccttcctgtcagngctgncttgccgagtgagaccaggctgaggaaggncacagacagctgaatctggaccagcgacacttcccaggctcctcctgctgggcccaggccccgactaccctgccctctctcaccacttccgccatgctgcagagccaccacaagctaaactgncagctgtgggcgtcctcaaggtgggcatttcccttttcttccaaccgtggcacccaccatgaagccaggacagcacagggatacccccaaanaattctnggccccccanttttttgaaaanattttanaggttttaagcctttggcccaccaaaa

SEQ ID NO: 2328 - DNA, 441 bp, Homo sapiens
  misc_feature (1)...(441): n = A,T,C or G
actgagggctcctgatcacccagaccagctcacctatggagcagaacaaagagacctggaagatggagagacaggaggcagtagctaaggatccaggaccacaagccagctattcattattcttcaaagagaaaatcaaagaagagacccagaaagaaatggctggttctccattaatcatgtcacagcgtctgttgacatttggggatgtggctgtggaattcccccaggaggagtgggaatgcctggactctgctcagagggctttgtacattgatgtgatgttggagaattacagtaacctggtctctgtggaaaagaaacagaccctttcatggttttcaagtacacctttatcttaaaaggaaatgggttgcccggccgtggtggcgcacacctttaatngcanaggcaggtggattttttgagggccccctgggc

SEQ ID NO: 2329 - DNA, 101 bp, Homo sapiens
atgcctccccgattctgacagaaaagcaggcaaaacagctcctgaggtccaggcgacaggacaggcccaacaaacctggattcccggacgagcccatgcgg

SEQ ID NO: 2330 - DNA, 724 bp, Homo sapiens
  misc_feature (1)...(724): n = A,T,C or G
ccatgctgacttattaacagaccttagaggccctgcgtgcctccaaggagcccctggtgatccaggtgctgagacgcagcccccgtctgcggggggacagctcctgccatgaccttcagctggtggacagtggcactcagaccgacatcaccttcgagcatatcatggcgctgggcaagctgcgcccgcccaccccacccatgggcatcttggagccgtacgtcctccctccctactttgccattgaatctgggtgggagaggatactgcaggcaccagatgctaaactttcctaacattttgaagtttctgtagtttgtcctttgtcctgacacctatgtatatgttcaaaatgttgatcttccactgcagattttgaaaagccttgttattggtcaagcggggagtgtgttcagtggctccttctgaggagcagacgcggtgttacatgagtactgagagttgagtagaactctctggatgtgttcagatagtggaattgctacattctctgatgtaagtaagtatttacagatgttaaatgggagtatttttattttatgtacatactctacaactatggtcttttttggtacaagctatgcactggaaatgcangccttcttttcaaaaactggctaaaattttcttaatcaagaatatttcaaatggnatttatgangnggaaacaattattggncnctaacatatttagaagctaaac

SEQ ID NO: 2331 - DNA, 373 bp, Homo sapiens
  misc_feature (1)...(373): n = A,T,C or G
gtcacatagcacgacatacgatagcacgcatncntatgtgaagctaggtgtagtngatactttcacagtcacaaatgcgcnccctagcgagcgtagngnaaccggcacagagaacagagaacatacacaacanaaggactctcngngatttccactgccttgcngtccacntggttcactagccagacgcccacangagactgtcngaccacagagagcncacacgtagacgcggacgccgtggncaagagtctctgcatccccacgggacggatggcggcggctccacaaggtgcgcgtgcaccgaggcgcaggtggaccctctcacatttcacaggnctgccggncagaatgnccctcataaatgtgtgat

SEQ ID NO: 2332 - DNA, 424 bp, Homo sapiens
  misc_feature (1)...(424): n = A,T,C or G
gactgagctttaaaatacaaaagctggggtccccacatgctgcatcatccaaggctggacagtacacagaacacaaatctcaaatcagaagtcctctgaaacagccgtcctgatgggatggagactcatgctgagaagatctgaagatgacatacagcatcgccctgtcaggcagccagctaccagaagctagctctcgaagcccagcaagaagttctctgtggctttgggcatctgtgcccagggaaggaccatgcgttgtgatgtctgctgccagcagacaagcatctaagagactgtgaccctgattactagctatcaaattgtgttttttggaaagttggcctgtgaatcaggcgattcctctgctgacttgcaaagaggntcctctaaataaaagcttatanggttttaaaaaaaaaaa

SEQ ID NO: 2333 - DNA, 114 bp, Homo sapiens
  misc_feature (1)...(114): n = A,T,C or G
ccagtgtgcatgcttcantcatgttcacgaaatggagggacagncaggacgaggactacaaccngatatgctgatatcatttagggaggncangtcttagagcacttaaagctg

SEQ ID NO: 2334 - DNA, 114 bp, Homo sapiens
tctcctctaagccatgacctcatccttaacctgactcaggacgggatcacactactgtttgatgctttcaatcaagtcagaggcatttaataaaattatctacacaaaaaaaaa

SEQ ID NO: 2335 - DNA, 249 bp, Homo sapiens
  misc_feature (1)...(249): n = A,T,C or G
aatgctggcaaaggatgaactggtgagcatacttcagcgctgtattgaggttttagattcctctactgaaaagcagcttggcaacacaacacagaaaataaaggatttcctgacccagtttcagaacctcgatgntnanannnaggaagangatgnntccngntnatanccnacggngntgctgaagacaaacccacnttntatctncttaagacttnttactagtgatgnaacttctgaggactacta

SEQ ID NO: 2336 - DNA, 122 bp, Homo sapiens
  misc_feature (1)...(122): n = A,T,C or G
gacgtctggggagctcctgcnttaggttagatctganggttcccagactgccttttgagaataaaatgggaggccagaaccaaagtcttttgaataaagcaccacaactctaaaaaaaaaaa

SEQ ID NO: 2337 - DNA, 406 bp, Homo sapiens
  misc_feature (1)...(406): n = A,T,C or G
gaaacggagtgagtggaatggtaccacagcacagagggagccaacagcatcagacttgtccttgacaggcatgcctggtttnaaatctgccatgaanagccaggaggtggcagggntccaggangntcngggcntaatccttngcccaagtttttgacncccatgggttttggacacagggtttttttcccgtggccctaaannaattttggcacaaaccgtggtttacaattttcnngggggcacaatggaacntnggaccccnaaaaaccacctntttcnaanaaggngcccnnganaaggggaatttngggntttttccccaantccttggtttttggaaanaacccccnaggggnccnaggggcccccttttcccnggggggaacccaaccggcccaacttt

SEQ ID NO: 2338 - DNA, 809 bp, Homo sapiens
  misc_feature (1)...(809): n = A,T,C or G
caagcccagatggcctggcatggagagacatactgactgattggaggctaccgtgtctactggagatgcacngattcccacacctgcagaggctgatcaagaggantangccagtgcccaggcgggcttccaagagacagcgagntnaggaagaatcggntcaagatctangctgtnccggtgcaaaagttcctngcctgaaattgaagcatggtggcaaagggtanccccacattanatgctgcctgagcatcctggaanagangaaaggctgctagctgcctcangaggttgagccctcttcagcaatgccctctactgaacaccaatgtaggcagaaccacagctgttctgcctgcatgctctgcagtcaagagcccacctgaatgccaactatccgtgagcaagaagtctcagagtagagttgctctgacagcacctgtctcttggtcctctagaggcgtcttgggaagcagaaaggggcggtctgctctgagttgagctgaattgaggagacaaagtgcagagagaagatacagagggaccaaaccggactgctctctgagtatgctctgntcttgaatcatgccacagncaccagcacaagccaggagtggctggactttctaaacctggaagaaatgagcagtagttaataaaggagattctggctaagatcttangagacagaataagaccccgggcgaccgctactgactgacactgggacaatcagcaaccattcaacctaccaggctctgtcttanttagtatntggctgggactggggagcctttgcacaatgattt

SEQ ID NO: 2339 - DNA, 295 bp, Homo sapiens
  misc_feature (1)...(295): n = A,T,C or G
ggtgtaacgtggtcattgcttcccggaagctggacagactaactgctgctgtggatgaactgagagcctctctgcctccctccagctccgctgaagtctccgccatacagtgcaacatcaggaaagaagaagaggngannnntctnggcaaatntaccttagctnannntggnaanatcaacttcttggtcancaatggaggaggccannaganggntccngtggaatacntcnatgnnangggatnagcatnctgngatacgaaaccancctgacnggcaccttctacatgtgc

SEQ ID NO: 2340 - DNA, 400 bp, Homo sapiens
  misc_feature (1)...(400): n = A,T,C or G
atgaggcacgcagtgaaagtgaacggggaagccactgttctgacaacgcacttctctaaacttccatggccatctccacaggaaacccagaggatctgtgagcaagtccgtattgccatngagganntaannatagtgtattnttcacttnctaaggaccagggantnaccctgagaaagctngtccnnaangctgncctggacattgnggacnncanggntcaagctactgnaanngnttnttactgctccatctnanagnactgaagaatggagacctgatttnctgcaatagtgtctcagtcgcatgccaacaggtgcctgagatcccaaaagatantanagccgcagnccttttgatgctgaccantagtgnggattntgtgaaaaatgcacatta

SEQ ID NO: 2341 - DNA, 186 bp, Homo sapiens
  misc_feature (1)...(186): n = A,T,C or G
ggaacaaattctattatcttccttccttttaaagntgacggaaattaaaatgattgtacngaagctgcancataaatagaggcttgnctgagtgganaccgaagtgngaactaccctncacantatgatcctgaaaaagaagtatttaatacattataaaaataaaggtttcaatctatcccatta

SEQ ID NO: 2342 - DNA, 125 bp, Homo sapiens
  misc_feature (1)...(125): n = A,T,C or G
gctgagaagaaagccaaggtaattgcagtaatgaatgctgtggaagagaaccaagcctcggtgctgtgggccttgnggccatttgtccgagttcaataaactactacattttttaaaaaaaaaaa

SEQ ID NO: 2343 - DNA, 155 bp, Homo sapiens
  misc_feature (1)...(155): n = A,T,C or G
attccaaaatgttgcggntgccagcagctcanaacgtgnacggttcgactgataaggccactccagctgcaagagagganctanacggggcgaaagaanaancggagccnanacaagttcatcctgttcaaagctcaattttactagttacaaca

SEQ ID NO: 2344 - DNA, 184 bp, Homo sapiens
  misc_feature (1)...(184): n = A,T,C or G
tgttgctgttgacagagaccttttctctggaatcgcggtaagaatggtatangactttgaggacctggattggcctgcgtgcacaccatcaacactacacttgctgctgtggactccactattcctggttctttgttcttacttctttgtacagtaaatgtacttcagcagtgaaaaaaaaaaa

SEQ ID NO: 2345 - DNA, 295 bp, Homo sapiens
  misc_feature (1)...(295): n = A,T,C or G
actcatccctggaaggcatgtgtggcactgancatgcccagctgggggaagatggncagcggccgccgnggngcacttcaactacctnatctnantctgagccttcatagcagcttangcaccaaggcaagatcctagcatccnaggaccccaaaaagaagcnagctcanaagccctctcacatgagaagaaacatactacatgaantttanaacagatcaataaactatcancaacaacaganaactccccataaaactgagtcatcaaagggaaaaatgaaagataatattga

SEQ ID NO: 2346 - DNA, 107 bp, Homo sapiens
  misc_feature (1)...(107): n = A,T,C or G
cactaagagcactggatagntaaggtcaaggagactctcacaaaggatccagagaccttgggagaaggacaacaagaatgagtgtgtctctggtaaatacaccacag

SEQ ID NO: 2347 - DNA, 474 bp, Homo sapiens
  misc_feature (1)...(474): n = A,T,C or G
gactgagaccctgtgatgtttccagtctttggctactgtatcctagcacaggatgctgctttgtactaccagtgctcacaagcttgagactgtttatgaccataagtttctaaagatgtctatcaaagaatcttgtgcaaaggaagaaaagtctcagaaaaaacagactatctcttcaccaacttttaatgaagacaagaaaaagggagaaatctcagcnggttctactagttcanaacatggtgttcagcctgtttcaaccaagaagagaaaactgaaagcagatgatacagacaatgtagactataatgcaaacagaaaaaacagtaaaagattgaatgtagaagttttcattcctaaaaagagactaaaattcanttcttcgacccaagcggnatcatatttaaataataatcnaatgacttcacacaggtggtcatnaatnggacctaaagatcctaaggttaaagatgg

SEQ ID NO: 2348 - DNA, 376 bp, Homo sapiens
  misc_feature (1)...(376): n = A,T,C or G
ctgaggtgctgatatttccaatgtttgcaatgaagcagcactgattgctgcccgccacctcagcccttctgtccaggagcggcactttgagcaagccatcgagagggtcattggaggccttgagaagaagacccaggtcctacaacccagtgaaaagacaactgtagcctaccacgaggctgggcatgcagtggtgggctggttcttggagcatgcagaccctctgctgaaggtgtccatcatacctcgaggcaaggggcttggctacgcccagtaccttccccgcgagcagttcctctacacacgagagcagctcttcnaccngcatgtgtatgatgctggggggtagggtaactnaacaacttgtcttttttca

SEQ ID NO: 2349 - DNA, 276 bp, Homo sapiens
  misc_feature (1)...(276): n = A,T,C or G
ttgtgtggccgaatanagnttcggagtgcgaatgctgnaagtaccaggcnngcnggtctgnctaatctgccctgnccatatgcctngaaaactatgcancaagcatggnatctcgggnatcagcttgctataagcngagntgcgcnnnatctctgcttgcgantgctaatgcactggncntgaantgctgaccaggactccacccgacctgnttgccaagccantagctggatcacaatgangctcangctnaccccggaacgtaaggatctacag

SEQ ID NO: 2350 - DNA, 271 bp, Homo sapiens
ggaaaggaaagtctctccaacaacgtaaggccaagcctccgaagaagcaggaggagaaggagaagaggagggacttgggggtgtatctaaggagcagggtagagtgccagagggtggggtgggaccctgacttcactgggatatctcggggagggggcacttgtgccctccaggtgtcttccaagatggctaagaacaaggacttgccagaaagttcatctgcacccatcagagtttaataaatgtcgtgttcctcccccaaaaaaaaaaa

SEQ ID NO: 2351 - DNA, 328 bp, Homo sapiens
  misc_feature (1)...(328): n = A,T,C or G
agactgggtgcaacaaaacctgtctcatttgaaggtgcttgaacaaatattttctaaacacttgtcatggagagtgattgaaacaagctgccaggactacatttgccaataacaagcatgtaggtggctgtagtggatgtccaactttgggagctgtgatgtctaaaaaccctttattgttttgggtgcagcttacatattggaaggtaaaatgaaggccatgaacaaagtcaanaagccataaacagaagcaaatggggaaaattaatatcttaatttaatattaataagnngnatataaataaacagttattcttaaaaaaaaaaa

SEQ ID NO: 2352 - DNA, 153 bp, Homo sapiens
  misc_feature (1)...(153): n = A,T,C or G
agcaagctgcacatgagctntactagactctgggaggganaagtngccaagtacttctgaaccatnttttaatacttgntttgtcatggngaanttatagcagntatcccaaaatgntttaattatcaaaatactgncttttaaaaaaaaaaa

SEQ ID NO: 2353 - DNA, 283 bp, Homo sapiens
gtctgggcagctgagtctgcatctcatctgctctgctgggccgcgctgcccgggtccctctggatggagctggaccagcaggcagagctgcggtcctgtcctttgctgagagctcagtgctgcggggtctcaggtcagctgggcgcttgcagcctgcgtctccgcagtctgggaggtgtaggcggagagtcgtggggaaccgtgggtttgggctcttgtaaggggatttgtaggaaaaccgcgaggtgagcccgggttctatgcacgttgtcaaaaaaaaaaa

SEQ ID NO: 2354 - DNA, 105 bp, Homo sapiens
  misc_feature (1)...(105): n = A,T,C or G
ctgggaaggccatgctttccttggctagaaatctatttttggaagtgtgaagtggngccanagtgtgaaatggngtantatcccttgattttccataaaacctgt

SEQ ID NO: 2355 - DNA, 402 bp, Homo sapiens
  misc_feature (1)...(402): n = A,T,C or G
gcacgcatctgttcctgccgtatcggaactcgaagttagagccgtctcagagcacaaggatctggatgcaacctggtaactgcgcagcactctcagccaaattcttatcacctcagaggactcaggatcttggccagagtcaaggagaagacagaatctcctagaagccttccctggacatcatctctcaggactcctatcctaagcctccagtgaggaggacatgctgttccaatctccctgaactctcagtctttctacctaagaagacagttcctctgtggaggcttctgagtagcccaagcatccatcgttgatccttcacatcccacagggtcttgggttccttgaggacaagggctgcattgaactcctttcatggnncccttaaccttaaggggg

SEQ ID NO: 2356 - DNA, 365 bp, Homo sapiens
  misc_feature (1)...(365): n = A,T,C or G
catctgcagaggcagagcttanagtgcaggattctggataaagaatactgagacaaggaaggctttatctgctccttagtcgtcctctgcacagcacacgtcatcccacgtgaccttacgccatctttcttcctggcggtggcgtcccactccactgcgcagacgcggaagcttcgctaaccggcgcccgaagttgattaaggacttctccgccggtggcaccccttcccaggtctgggctcggcatggccgcactgcttgtacggagcgtggtggcttcggtggtggacccgttcctgcacctgagtcgcctcgcggtgaagccccgagtcttctcctcgttcctgctggggacattgccacgc

SEQ ID NO: 2357 - DNA, 108 bp, Homo sapiens
  misc_feature (1)...(108): n = A,T,C or G
tgcctacttgaagaatcnggaagaggngatganggacactattganttnctnacacccgggtcctgactntagcatcttttccatgttctgnctgattggactagctc

SEQ ID NO: 2358 - DNA, 281 bp, Homo sapiens
  misc_feature (1)...(281): n = A,T,C or G
cagcttaactctgaagaaacttggtatgcttaaagaaatggacanaganntnaactnagtagncatngctgngaagctgcagggtncaaaaaggatnctncggtccaatgagatnatccttgcagccagnggcctggtggagacagagctncanataaccttctccctccagtaccctcanttccttaagccgagatgccnncngactgcagatnatgttgcncaggaggaagcggtcaanaacctgaactatctngggctataaaaccttagctgtgcga

SEQ ID NO: 2359 - DNA, 112 bp, Homo sapiens
  misc_feature (1)...(112): n = A,T,C or G
ggagtaaggcatgccgaggcttnaggctacgtgactttcncnatgctggaagatgcacagagggccctnaaggagatcactacctttgaaggnngnacgatcgaagcgactg

SEQ ID NO: 2360 - DNA, 368 bp, Homo sapiens
  misc_feature (1)...(368): n = A,T,C or G
aggatctatgactaagcttgcctagcgatccctgacctagtctagtcagtgtgactaccaacaacagccatgaagaccaagaaggcacaagaatctaaccatgacctgaagttcaagctcataatttctcttcttgagtaagaaattaagatgttccaggaagatgagaaacttttaaaaactgctgccaagctctggtttgcagaagacttcacagaatggaaggaataaaaaaactccagcagaggctggtgaggtggctnagtggttaagagtgccgactgntcttccaaaggtccccagttcaaatcccagcaccacatggnggcttaccaccatntgtaacgaaaatctgattcctcttttgg

SEQ ID NO: 2361 - DNA, 428 bp, Homo sapiens
  misc_feature (1)...(428): n = A,T,C or G
ggaacaacccagactggatgtctcccttggcaaancnnnntgnacacnnactgtnccnngaagtnccttactgatggctggantgatcccanatgcctgtagaaagcctaccccagntngantgatgactnacaaaagnggcccccngagggtggccanacagnctgcggccaggnncgncgtgaggctcgatcatccccaacanctgcttcctgctnaccaaccctttccactggccttgtgagttctgtaaatttctggacttccagagctgacaggtttgttagggttttgagtctgtgaacctcccttcagcccaagaaagaaatcttctcatctagaggaaagctatatgacacgtctttacgtttcttcttcatcaactgnatagaaaaattttgaagtcaaaatggcttccaacttatggg

SEQ ID NO: 2362 - DNA, 152 bp, Homo sapiens
gctgctgagaaccagctctagatctctgctagagagtcctccttctgcacaagttcccggtgggataacctgccatgtttctctgaaactgtgtgtacctgttgtgaagtttttcaaatatatcataggattgttactggtaaaaaaaaaaa

SEQ ID NO: 2363 - DNA, 189 bp, Homo sapiens
  misc_feature (1)...(189): n = A,T,C or G
accgtggcttttgatacctatttatttaaacanttggggggtggntgngtgcatctgagaccctgaagagcagggaactgagatcctgggttctggggtctctatgaaatctgttcacagtgtcttcctcacttcctacattatttattaaacgattactttttatattaagaggaggaaggagggaag

SEQ ID NO: 2364 - DNA, 140 bp, Homo sapiens
  misc_feature (1)...(140): n = A,T,C or G
aaaacaaccgaggggatcaaactgngctcattcttcntgcaaaanctgcacanaagtcttacgganatgaaanacgatttttttgccctcctccttgtgcgtatcttatgggcagtaggttggaatgaaaagcaaaaaaa

SEQ ID NO: 2365 - DNA, 185 bp, Homo sapiens
tgaagacaacaaacatcatggcatacttcagtattacatttatttcattggaggtgactcttgggcctgtgcatggacacccctttaagacaaattcagggagatgaatttgacagttctaccgtagtggtaagctggtggaaggtggcacccgaacaaatataatttggcacatatttttaaaa

SEQ ID NO: 2366 - DNA, 320 bp, Homo sapiens
  misc_feature (1)...(320): n = A,T,C or G
tctatgctacagcttaaccagatnncggaatggacancaactgcntctgctacancgtntggctcctgcncttgcaccatntnctgcgcctgcacanaacatgcagatgcangtnctgcangaataagctgntgctnntgctgtcaccgtgggcatgctccaaatgtgcccanggctgagntatgcaaaggcgccgngnacaagaagcacgtgctgggcctgatgtgacgaacagcgctggcaccacntggaaataggatcgggacaancccangggtnttcctatgcngntccaccnctgtttactaaacccccgtttt

SEQ ID NO: 2367 - DNA, 261 bp, Homo sapiens; identical to SEQ ID NO: 17
  misc_feature (1)...(261): n = A,T,C or G

SEQ ID NO: 2368 - DNA, 248 bp, Homo sapiens
  misc_feature (1)...(248): n = A,T,C or G
atgcagcatggctacccagggccaaaggtgaaacaggctacagaatggagaacgagaatctggggacagccctgaagatgccactagactgcctttccacctgagggtatgtgggaaggacaaatggtggnaccngtgggcacncacacctgangcacatgtgccgtagacccccaccctcanccccacccngtatgatttcttnattgctgcttgcacttacctntcccatcgtcttggagaataaa

SEQ ID NO: 2369 - DNA, 212 bp, Homo sapiens
  misc_feature (1)...(212): n = A,T,C or G
ccccgaagttcggtggatagagcgggntgagacctggngactcngngngcacacngcctgagacttgggcagctctctgctccctgccagactcctnggcctggaacaggtgccacactccccacanaaggaaacctgacctctggtcatgtaagcccanaacagagntctctatgctaatganggacctnnaggcccttgagggctcacca

SEQ ID NO: 2370 - DNA, 118 bp, Homo sapiens
  misc_feature (1)...(118): n = A,T,C or G
accaacatactggaanaaaagaaccaagatccgcaagtcatgctttgatttccacgagcatgcccacatatataactcccacacaataaataagcatatgtgtgtgtaaaaaaaaaaa

SEQ ID NO: 2371 - DNA, 381 bp, Homo sapiens
gccaatctggaaaagaaacactctacatgatgaccatagggacaactccattttgggggtataacgaagcagaggagatcaacggatgcatttacacagcctggggatgaacagagggaggaagccctcacaggcatcaaagctacctctggatcccagaggttgatggagacgtgggaggagggttgcagacacagcactgtgggccattaccacacaggaagaagcaagtagcaacagaacacgccctggtgcaggcccgcacagagggaaggatgagggccactcccggaaaggaacaaaaataataaagaggaaggctcgatcgctatggtgaactggaccacacacagcgggggccgggccaggacatggcctgcc

SEQ ID NO: 2372 - DNA, 328 bp, Homo sapiens
  misc_feature (1)...(328): n = A,T,C or G
gcctttgagaaagtggtcaaggaatgtgatcaaggaggtaagcnncagcagnggcgatctnattccggtggacagcctgcggaactccaccagcttcaggccctactgccttctgaacaggaaattttcaagctcaaggttctggaaaccccgttattcatgtgtcaacctgtcaatcaaggacatcctggagcccagtgctccagaaccaganatntnntttnacatnntgatncncnangattgaacagaagggaatgggcaaagcccagcctgccatctaactgggcatgttcaactctactcctctggtcctatttccagagta

SEQ ID NO: 2373 - DNA, 309 bp, Homo sapiens
ctccagagtcgatggagaagctccaggcccagtactgttacttatgttcagaaaacatacggaaaactaatcctttcatactgaatatactccaaaaactggatgaagaaattgaaaagcgacccaaagaaaaatttaccgtaaatattgctggtaacaatcgcttagactccggacaaagaataacaggggaagacttttggcttctttccaaaactttaaggaaccagccatgtatcagtggtgtggatgtgaggtataacctcatcggcgatgtcggtgccttctatgctgcgaaactacttcagg

SEQ ID NO: 2374 - DNA, 166 bp, Homo sapiens
  misc_feature (1)...(166): n = A,T,C or G
tactaaaatggccctctaaatagcccaacaattattattttctttgtcctatggatttggctttgaaagatgtgctgctcttaataaggnaaaaaccaacttttgnagctatttcatgngntaagcacattcaaaagttgctagttnaataaatgaggttcttaag

SEQ ID NO: 2375 - DNA, 109 bp, Homo sapiens
ccaaaggacttcatggcaacccgatttctagtttcctgacatgtttctgtacatttgctgtgccaggggatcaagcctgaataaatatcctttgtcatcaaaaaaaaaa

SEQ ID NO: 2376 - DNA, 448 bp, Homo sapiens
gactgagctcctatatcttaaagaagctggatagcatctgaggacgggcagtcaggtggatgcatggcatgaagacctggtgacggcttctcctcctgtctgcagctgaattggcccagaaaggtgtaaggctgattaaacggacatataaactacttgttgagaacaagtaggactttgagaactgacctccatagctgaaatataaagccacttgggaagtgcaaaaagatgtcttgtgttcatggtgcccttaggcccatgaactccacccctgtgagtgttgatggagtggttaataatgtcaggctctaaggggagtcatttctgtttaccacttctgttcaaagtgttatttgtgaagtctgtttggaagtcagcatacacccacaatgacatttaagcacagtctatatttttaataaacattctgatgaagaaaaaaaaa

SEQ ID NO: 2377 - DNA, 110 bp, Homo sapiens
gtacacggtcaacgttcttggggcccacttctgagtttagaagacctattacaaaaagtgaagaactagactgtgggaaaataaatggcttttgactactaaaaaaaaaa

SEQ ID NO: 2378 - DNA, 390 bp, Homo sapiens
  misc_feature (1)...(390): n = A,T,C or G
atggcatcgaagattccctttgccacagatctgacagactatganaaaatgccagtgagnccatttgggaaagtgaagcccagcggagaggggacagcacaaaggcctatagaaatangtgcctcaccattagcagagctggaggacaagataaagcggcacacacagcagatccgcactcgaagtttcctgggtacaaacccantgcaagacattaanacagccaaccaggacctggaaaccactaanaaacttcaggaggagttaangaaactgaaagtggagatgaccttgancaaagaccntncntttccattctttacttggaaacctttcacttnacccaccagcatnacagcctcaaaatatattttttaacacgaaatccta

SEQ ID NO: 2379 - DNA, 393 bp, Homo sapiens
gcacgccccaaaggtgagggtctgacgccgtaccaaggcaagaagcgctgctttggcgagtacaagtgccccaaatgcaagagaaaatggatgagtgggaactcttgggccaacatggggcaggagtgcatcaagtgccacatcaacgtgtacccgcacaagcagagacccctggagaagcctgacggcctggatgtgtctgaccagagcaaggagcaccctcagcacctctgcgaaaagtgcaaggtcctgggctactactgtcgccgtgtgcagtgatcttggccaccactgtagcacccctcagctgccacctccctgtgttgcccaaagggctgaatgtccgcatgcttgaggagatgtcacgggcctgtgggtttaagcaaaaaaaaa

SEQ ID NO: 2380 - DNA, 505 bp, Homo sapiens
  misc_feature (1)...(505): n = A,T,C or G
tggaatccaatccacagctntcccttgctgaccagntncttgaactgaccacagtanntaaaggccngnntgagcnncttnaagatcttacatgtgacccanctgctgctgntgnncccagtaagtgacagacagcaccatggagcactagctccaactactactcaccctccaagtgaggcggctgccagtgtgagcaatgaggggcagtgaggctgggctgggaagtgggggtcagcagtgttaaggctgtaggctatcataatgggggttagacagcaaagtaattcggtcagatgagcagggtagataagtggctgcgcagcaatgagggtggacagaaaggtgacagctggggtaagtctggagaagtgaaggagaactatacagtggaagcagagacacaaacccatccaggggtgacttccttttgggtgcctcagagacggcttaacttcactcaatgtgtagaaagaaaaacgaatttttctcctaaaaaaaaaaa

SEQ ID NO: 2381 - DNA, 154 bp, Homo sapiens
gtaccccagaggttccacacaagtaccaagttggagaatgggtatatgttaatagacattgtgctgaacacttggaagcaaagtggagagggccgttcctggtgttgttgaccaccccaacctccattaaagtggatgaagtaacaaaaaaaaa

SEQ ID NO: 2382 - DNA, 138 bp, Homo sapiens
atgccacaggacagccagggctaacacagagaaaccctatcttgaaaaacaaccaaaaggggaaaaaaatcaatctggaagaaaagctggcttattagggctaatagtgtgggatttaaatatatacaaccatggctt

SEQ ID NO: 2383 - DNA, 153 bp, Homo sapiens
  misc_feature (1)...(153): n = A,T,C or G
cagacctttgggggagcacanaaaatcatgtgtggatcctagacactggaacaagaacctgtgaagttaagttgccttggagaccctgagatattagagatgccagcgtcgtaggatacctgtgaggaaagctactaacacggagtagaaagt

SEQ ID NO: 2384 - DNA, 380 bp, Homo sapiens
  misc_feature (1)...(380): n = A,T,C or G
ctctgatcccgcttgctgttcctactgacacctgagccgcggtggccgatgctgctgaggcccttccagcccacgagtcaacctacttgattgnnagccatgccnttagtgaaganaancatngaaccccggnacctgngccggagcgccctgccggaaggagtcaccanngagcnggaatgcgtgaccaacagcacgctcgctgcaatcatccgccagctgagcagtctgagtaagtcccctcggcatccctggctaccgctggtatcttacagactttacggtacccagtggatttgacttgtgagtggcaactgtgaggaaaagcgtcttcctccatacgccacggncaatgactgtgtcaagccctgggctgctgg

SEQ ID NO: 2385 - DNA, 259 bp, Homo sapiens
ggtgttgtgtgaaggtgcctgaggccagaagaggctgtcagatctggagctgtagttgcagatggttgtaagccaccgaacacaggtctttctgtaactcttccaaaggaagcaatgatgtggctcgttagacccgaggccgaagctgcagccgtgcactgaagcagatgggaaaagctgaactcgccacccacgagcagcgccggcagtgagctccacccagcatgacacggcggcccaccctccacacaaaaaaaaa

SEQ ID NO: 2386 - DNA, 394 bp, Homo sapiens
  misc_feature (1)...(394): n = A,T,C or G
caaaactgtacaatctaaagtggactgcattttgcaagaagntgagaagtnnacagacctatagaaactctacctctaccttnaactgccttntggncttancagngcagagaananngatcngaangccatgtcatctagtcgggcacagcaaatgcatgccttttcctggattcgaaataccttagaggagcatcctgagacgtcactccccaaacaggaagtctatgatgaatacaagagctactgcgacaatcttggctaccatccattaagtgctgctgactttggaaaaatcatgaaaaacgtctttccaaacatgaaggcacgccgtttaggcactagaggcaaatctaaatattgctacagtggactaaggaaaaaagcttttgtc

SEQ ID NO: 2387 - DNA, 297 bp, Homo sapiens
  misc_feature (1)...(297): n = A,T,C or G
gtgggtttgggctgagctcgagtcctcaccagagtcttcananataangtncngagganntanatntgangcccagcctngngggctnaanggaaacctactatgnacaaaanaaaggcctacggnggaatgcaanacctgncanncaggcaccatgggtggcagccatcatgcttncatgaccattgggcctgctggnctacctggtcttagcccaggaagccaccaggtaggttagggtggtcagtgccgagtctcctgcagacacagntatacctgtctttctgcactggtcca

SEQ ID NO: 2388 - DNA, 208 bp, Homo sapiens
tgagttccctctgagggactcggcagctccgaaccaagctgtggatctggctctctaagggaacctccagaaactcagcttgtgggctgagccaggttctgtcatcgaatcagggaactctgtgaccatttggtgtgaggggaccatgagaacccaaaacaagtaacatggaataataaaactatttaaattggcaccaaaaaaaaaa

SEQ ID NO: 2389 - DNA, 389 bp, Homo sapiens
tgtccggaaggcagaggcaaactcatctcggagagtttctgaacttgtgtggaaatcaggatgtgtgggaattgaatttactcaagtgccaacttaccttaaactcctaatcctccagcacacccccgcaactgctgcgattataggtctgcaccattatacccggtcttttagggcctcttaaaaagagggagcaaatgagagcgatggccccgtgggtgaagttgtttgccactgtatcaacaatgctagcctgacaacctgagttgtggaaagacaaaatgaaggccacagagatgtcctctgacttccacactggtgcagatggcaaatccacccacctacgtgtcacacacacataacaacaacaataataataataggcatat

SEQ ID NO: 2390 - DNA, 222 bp, Homo sapiens
  misc_feature (1)...(222): n = A,T,C or G
gtctgcaaacatgcatgtacacacccatacctcagagaggctntgcattcccggnctaagnncaaganccatgcntacacatatggcgtgnggagaagntgaagcnggtgccnatagcacggagagagccatggnatctttttntctggngactactnnntagtgcttcanantggccgataggatgantgccgntcangntactgtgctgcttctactcag

SEQ ID NO: 2391 - DNA, 250 bp, Homo sapiens
  misc_feature (1)...(250): n = A,T,C or G
gtcaatagaatcttcgtcccctcgccttgagcttcaagtgcacctcctcttatcatgccatccctctacaggctgggaaatctgccaacagacgatgacctgccttgactctgcctgacaggcagactttctttttttntntgnttnaaanaancggnaaacagntgntgacanangtgtgtgcccgtgcgtgcgtncgtncgtncgtgnncngggttngaangggngccntttgaggccaaaatagggc

SEQ ID NO: 2392 - DNA, 262 bp, Homo sapiens
  misc_feature (1)...(262): n = A,T,C or G
gagtggagcgagttgcaggtanctgaanggcacttncaggcctagagggattgttctgctgccaaggaanattntgcnatggcttgtacnnacatatgaacgttgnttggatatnancgatttttagngccctgaagattttgataccnaccagagtctnctggaaanagcttgtcctgnataccangnggatgctnanctcatagttgaatcatncccgancttcactgagcagacctgatctcagaagtaacactgactc

SEQ ID NO: 2393 - DNA, 103 bp, Homo sapiens
  misc_feature (1)...(103): n = A,T,C or G
ggacggagcgattctnacggaggaaggagcacgccaacagggcctgactgcgtacagacatgtccccctcaataaaattgcagttgaaatggaaaaaaaaaaa

SEQ ID NO: 2394 - DNA, 242 bp, Homo sapiens
  misc_feature (1)...(242): n = A,T,C or G
ctttcctcactgaagttgctgctctgnagtggaatctcacactcagcttaagaaagtcaagtgatacngattggagccatcantcatactggggaagctanctnaactacccngaacttgatnnatgggaaanaangggtttccnagacaactngaanccntggatgatgnaatgggtattatgcccctnaaataccaatatagcctttcatctttttctgaaagtattattctcataagga

SEQ ID NO: 2395 - DNA, 423 bp, Homo sapiens
  misc_feature (1)...(423): n = A,T,C or G
gcatggcgcgccggatgccttcagggcgncaagcacctcatgntcnccttcaacctgctnttntgggacattgccagagccaccaacatcccanagaacaaacaagaccatggcttcctgcattgggcagctccctgctacccatatcacaaatataagctgttacagganaaatgancanaancaagaancntnggaagtgcgagnaganttnnaangngnantntgnagaanactngaaactgaagcnaatnacagatttcaagggnantcttgtgcttggaccctgntnacctgaanatgaatccntgntanagtggctnagatgccangttctgcctagctaggcnnactnacaacctctgcaggnagagccttgtgtctttagctatgganctgtaccatagagtgtgcattcctttg

SEQ ID NO: 2396 - DNA, 197 bp, Homo sapiens
ggctttgccctctcagaggccatggggctcttcgccatgtgacgcagccgtctctacttccagctctcaaggatggttctttcgtgtctcgtctgccctgtacggtccttttcctgtacctccccaagaaggctggggaaaacgcttggctcaggtttgacagaaaacaaataaatactgtagtaataagaaaaaaa

SEQ ID NO: 2397 - DNA, 353 bp, Homo sapiens
  misc_feature (1)...(353): n = A,T,C or G
gcactgctatgtcgggggagatggacaaagccgctgatcagccgccgcctantggacacgngatggcagtctggctgaggtccccaaggaggcccccaaagtgggcatcctgggcagtggggattttgcccgttccctggccacacgcctggtgggctctggcttcagtgtggtggtggggagccgtaaccccaaacgcacggctggcctcttcccctccttagctcaagtgactttccaggaggaagccgtgagctctccagaggtcatctttgtggccgtgttccgggagcactactcctcactgtgcagtcttgctgaccagttggctggcaagatcctcgtggatgtaa

SEQ ID NO: 2398 - DNA, 160 bp, Homo sapiens
  misc_feature (1)...(160): n = A,T,C or G
tgacagatgctgctggggaagctgggtgtgactnnangcngttaccacctangagttatatacagattttgatcntaacctggnatgactgngcagnttgtntggagantttnatctgnaggcccgnaagggccnggaaggatggggggcataaaaggca

SEQ ID NO: 2399 - DNA, 137 bp, Homo sapiens
  misc_feature (1)...(137): n = A,T,C or G
ccatgacaaccagtcatcaccctcangacaggtataangcancnggtgntatcttctttgtgctgggcctggggacactgggtaccctggaataantctnatgaccgttncatgacatttcacaagccgcctggacc

SEQ ID NO: 2400 - DNA, 263 bp, Homo sapiens
  misc_feature (1)...(263): n = A,T,C or G
ggagaacggactattacatgcgctcatcttcaggncnccctccctccagagaacnagctgttgcagaaccaggacacggatgcctgagcgaatcganccaagggatcgccngacatgnattcctcnntcnttatacaccacaacgnnagagcatgncacccagcagctttntgancacacacgtanccgngaggatagaatatcgagaaaaagggaaagagaaggacnnggatgccaanaaacacaaccttggaataaataac

SEQ ID NO: 2401 - DNA, 235 bp, Homo sapiens
  misc_feature (1)...(235): n = A,T,C or G
aggagtttacactgaganctctncngtgtactgactatggaactgaatntcnannnnctgntgtcanacnnnaatnctnaagacnngngaagtaaanactgtatggatgaccctctaaggctcaacctctctatctaattgtatatggccttaanagagataattgagttgggtggngataactggtcacttgagttcaaggccacctggtctacaaagcaagttccaggacagg

SEQ ID NO: 2402 - DNA, 356 bp, Homo sapiens
  misc_feature (1)...(356): n = A,T,C or G
atgcaattataaatccaanaccatngagcccttttgngatctgtccctggaattccctgaacgataccactgcntataaaaggggtttgaccctttgaatcagacngagtgcctgctcactgaaatgctagccaagttcaccgagacngaggccctggaggggagaatctacgcttgtgaccagtgtaacagcanacgacgaaagtccaaccccaaaccccttgttctgagtgaagctaggaagcagntaatgatctacagactacctcaggtcctccggctacaccttanaagattcaggtggtctggccgtaaccatcgtgagaagattggggtcatgtatcttttgaccaggg

SEQ ID NO: 2403 - DNA, 134 bp, Homo sapiens
  misc_feature (1)...(134): n = A,T,C or G
cactaacagtcatgacnnatctggtgatcatttggtctgacatgtgcacatatttcaacaagactaggactgtaganagatcaggactatncggattatcatagcanccagaactggccagaagatgcaagctt

SEQ ID NO: 2404 - DNA, 188 bp, Homo sapiens
gatgagcctgcccgcaaaccagatcaaggagcccggcaagcagtctcagcccgcaaaatcgctcaaggaacccagtcaggaggctctgcctgtaaacctactcaaggagcccagccaggagtcccggatcctgtgccctgacccggccatcgtaagtgcacccctgcgtggccgctgaaaaaaaaaaa

SEQ ID NO: 2405 - DNA, 188 bp, Homo sapiens
  misc_feature (1)...(188): n = A,T,C or G
tacactgattaaacactttgagnannctggtagcntataattaggatgnctgtncccacacactccacactgcaggggnactgcntactgaatataaagctgtggaagggacatctctgtncggacctcgagaangtctacagctctgatcgagaatgganttggaagccatggctaaattacatatt

SEQ ID NO: 2406 - DNA, 231 bp, Homo sapiens
  misc_feature (1)...(231): n = A,T,C or G
ttccaagaggaccttanaaagggcttgggctgtatctgctttgtgttngtccctgcctggatgtgaacatttgaactgacccttcgaatcaatgctcatgcctgaagcacgtctatgatactcatctgccgtaggctggaaagtgaggaacaagtggggtgtttgggcaccccacatcctctactatggaaatgtctacaagattcgtgttggatggtttaaaaaaaaaaa

SEQ ID NO: 2407 - DNA, 558 bp, Homo sapiens
  misc_feature (1)...(558): n = A,T,C or G
gtgacacgatgatggtcgctttcactctccttccaggaggacgctccggagttcgattcctcgctgtcacattcagtggtgtcactatcttgctggatctgattcacccggaggaactgggaatggcgcctgactcgtctttgttcaaggtaggcgctgaccaaagccacctcggaatcggttactgtggaaacntggttctgctntggnttnttcatcaccagtgaagagtnccaggacccttctctattttgncgcttacaggangtttctttgcttgctaatcnacanaacagacaaacaggtnangcaataatagtactaacagtcatgaataggntgctatanaaaggtcagngaagcctnnaggtggtggtncatgcctttaatcccagcactctangacaaagaggcctagacaaatagatctctatgagttcanggctagcctaagnctaaaagttgagttctaggccagatagggttacaacnggangatcctatcttanataaatgaacaaataaaccaagttacctngancacccaaaaaaaaaagg

SEQ ID NO: 2408 - DNA, 107 bp, Homo sapiens
  misc_feature (1)...(107): n = A,T,C or G
gatgaaggcttctctgctctaggctttccctcagaccctgaagacatctgtntctcatttcccatctgccccaataaagaagtttctatgtcaggcaaaaaaaaaaa

SEQ ID NO: 2409 - DNA, 232 bp, Homo sapiens
agggcgccaaaggcgacgcgctggcggccagctccaagccaaccaggcccattgcgtccgtctgcaggaacctgtcccttcaccctgctttggacactgagcttcggaggatctggctgcgagctgattcaacgccagggcgccgcctagaggtcggtcgcgtcctcggtctcgctcaccgaccacagagctgcttgtccaagccacagtgtcagacttaaacaaaacaaaa

SEQ ID NO: 2410 - DNA, 136 bp, Homo sapiens
  misc_feature (1)...(136): n = A,T,C or G
caatacctgcttggaaagccatactgtagacacttaaccagatatggcctgggggaagttttggaaccagattgnttcctgcaaagctnctttttactggtttggcttgnatctaatgggccttttaagctaaaac

SEQ ID NO: 2411 - DNA, 397 bp, Homo sapiens
aagactgagtgcacttcacagcaaaaatgaaaacggaatcattaaaatggttgaacacagaccaattcttttaatttacaatttgctgaaaaatcattgtcgctgttttcaccctatgaaccctactaagagaacggtttctcagagcgcagccgcagccgcctggcacggcctacgagcgagcgccaggtgcatttgcacactgactggaagaccacgtgggcaggagcagggtaaggcaccactctggacagtaaggtagcttgcagtaacaagagtcagcaccacgagtgggtgctcagcaaatacttgaataaatgaaaaccataattagcacgattctgttcatcgccagcaattcttcaaccccaataaaatacctataaaaaaccaaaaa

SEQ ID NO: 2412 - DNA, 261 bp, Homo sapiens
  misc_feature (1)...(261): n = A,T,C or G
gtctcgctgaaagagtcggctgtgatctacagcctgnggaccccacaaggggtgaggtgacgtttaccaccanccaggtctccgagggctgngtagctcangctgccaatgctgtgcgtgaagtccacgttctcttcctggattttcccggagttactgtgagactccaggataaagaaagcagaacacagaacacagaacctgcccacagtgaaagctctagtttggctgttataaattttgtcattattaaaaaaaaaa

SEQ ID NO: 2413 - DNA, 232 bp, Homo sapiens
  misc_feature (1)...(232): n = A,T,C or G
cacagggtcagaatccatgaccatcatgncangangtatngcagngtgcagatnngngaataaacaattccagntntctgctgcancatgctgttaactgtggattnactgtgtgcaagnctgttttanattttttaatctaagcaccactgaatcttattaaacgtggtttttgggnngntnggtnngcngggatctgtgagagctcatgngggttttggcctcagtttga

SEQ ID NO: 2414 - DNA, 450 bp, Homo sapiens
  misc_feature (1)...(450): n = A,T,C or G
gaaggacaggagaccagcaggagctgggatgaagcangatacatccaaaagacaaaaagaattggccccagcccccnngccaccctgcaaactaaggcatctcatttctgtggccaaagagaaggggcaaatggaagtacccaggagaggagctggcccagggccctcagcccagctccagaagggtgaccttcctcatgtaggctcaggtaaaggtagcattacccaaagcctccctcatttcatgatggaagattctggaacaaatgggaatgccagtaaaccnccnacagccaacacagggcagctcaactttctctgtgtncccaatttcttggtgtgtgagtggcaatccctaattgcctttctananaagaaattcactctgcactagtanaggattctactgnagacctctccttgaganctttcccactcacccctgatgat

SEQ ID NO: 2415 - DNA, 367 bp, Homo sapiens
  misc_feature (1)...(367): n = A,T,C or G
ccaaagggaaatcatcacgggnccagccagaanancanctncacttcaattgggtctccatggggagaagtgcttggtaaaaggttctgcacatcaatggccctgtttcctggaacttacagacaagttctcagtgtatccagcaatacaatacccactgccggaagactggagggcaatttactcaactgggaagtttcatttgaaactctcttctaaaaatattttcnggggctggcgagatngttcattggtaaagagcaccanctgctcttctgaaggtcccnagttcaaatcccaggnaacnncatggtggnctcacaaccatccgtaaccgatatcttgatgccctcttctggagtatttg

SEQ ID NO: 2416 - DNA, 163 bp, Homo sapiens
  misc_feature (1)...(163): n = A,T,C or G
cacatgcgtactgtgacatgggtgtatgcntacacatanacncncgtcctcacgttgtnngaataaaattaatncctttgttgcacnctgactccacatgcngtcctgtgcatgggtgtatgcatncacataancacacatccacacgttgttaaataaataa

SEQ ID NO: 2417 - DNA, 241 bp, Homo sapiens
  misc_feature (1)...(241): n = A,T,C or G
gcctggacataggccatannaactactgcgtggaactctcacatgggctgcctatnaannntggctnngttccatatatctnctgctctccaatttgagagaatccgagctcgggtcccggcnatcnaanntcctatnctgaagcccctattctctagaaagtataggaacttctcgacctgcaggcatgcaagcttcgacctcgacgtcgagaaggagtgagggctggaaaaagaaaaaa

SEQ ID NO: 2418 - DNA, 261 bp, Homo sapiens
gcagaggtggagtcattggcgagatggcaagctggaaagaaaactcaagaactccttgtaagagccatggaagttaaggaaggggaggaaatcaacttgaacacacgttaagatgcctttctcgcctctgaaggatcctgagtcactgccctcatttactatgaatccctccaaaattaaggccgtttctatggtgcttctctacaataattatgtggctttataattagttgataaaatattaagacttaaaaaaaaaaa

SEQ ID NO: 2419 - DNA, 239 bp, Homo sapiens
  misc_feature (1)...(239): n = A,T,C or G
atgaacctctagtcttgctttgaaaaaagctattttgtgtaactcttgactgtgaatacatttctaatacagcctttggaatcgtnacgggacaagtgtgccatggctccggtcggtccagaggncatgattcnatgnaccgaatgacaggatgacaaccatccataaaganatctntcncnntntnatggagggctggagcacatggtanacggtacttacatataataaatacctaa

SEQ ID NO: 2420 - DNA, 267 bp, Homo sapiens
  misc_feature (1)...(267): n = A,T,C or G
atgaactggccattcatacctcgagggagacgacagggnccattgagcggatgtgcttttctggatcnagtggaccacagnnnagcttgaanngtgngcgatatctcntgctgaccnanatgaanccttganattctgggaaggantnctagnacnngaatcctattgacaatgtgagctcctctgagtgtctgnganntncttccacgntcntnatctgttgcagcaagacccttttctacttgaatttgtttaatgatgttaatt

SEQ ID NO: 2421 - DNA, 321 bp, Homo sapiens
acactgagttcagaatgctgcagtggattgtacgagggtggaaaataacgaattaccttctccaaatctgaactcaagtatgaacgtggtcaggatgggccaaaatgtatctctgtcttgttccaccaagaacacatcagtagacatcacctattcgctcttctggggtacaaaatatctagaaagcaagagaagacgagggggagctgtggatttccacctgaggatctccaatgccaacgagtcaggcccctacaaatgcaaagtcaatgtttccaacttgatgaaatacagtcaggatttcaacttcaaaaaaaaaaa

SEQ ID NO: 2422 - DNA, 344 bp, Homo sapiens
ctctctgacagactatgtgccaggaaaagactgtctgctctgagctaccaggcccctaaggagtactgtgacccagcggagttgcaacccattggagtgaccgcttcagcctaggaaataccactcttacagtcaagcgagcaatggatcaaaatgctaatcagccaggacaggagagacccagcgttcgcctggaaaagctacagcactgggcaagacacaagcaaagtggacgcctactggtgctggcggtgaggccaggttgccccgcttcaggttttcgctgactgtacacagttcaattccactcatgttcagtgagcacaaaccatgcaccagaaact

SEQ ID NO: 2423 - DNA, 124 bp, Homo sapiens
  misc_feature (1)...(124): n = A,T,C or G
gacgtctgggctctccttacttagttattcttgcttttaacttatgtaagttcctgtggtgactccatgtnatatgtagtgaaattactgtatatagtttctattnaatgttaaaatgctaaaa

SEQ ID NO: 2424 - DNA, 848 bp, Homo sapiens
  misc_feature (1)...(848): n = A,T,C or G
aaaagtccaatgtatcagtagaagagaacgtaattttggaaaagccttctcatgtggaactcaaatgcgtgtacacagcaactaaggatttgaacttgatgaatgtgacttggaagaaagatgatgagccccttgagactacgggtgacttcaatacaactaaaatgggcaacaccttaaccagtcagtacaggttcatcgtttttaatancaaacaattgggaaaatattcttgtgtctttggagaaaaggaactaagagggacctttaacatncacgtacccaaagctcatgggaaaaaaaagtcgttgatcgcttacgtgggggattctactgtgctgaagtgtgtatgtcaagattgtcttcctttaaattggacttggtacatgggtaatgaaaccgcacaggttcccattgacgctcactcgaatgaaaagtatatcatcaatggttcccatgccaatgaaacaaggctcaagattaagcatcttttggaggaagatggaggatcctactggggcgtgccccttccagttaggggagaagtgaggagcaaaatgagctggttgtgctgagcttnctggngcccctcaagccatttntgggcatacttgccgaagtcatcctcttggggggcatcattctgctttgtgaagnggcccccccccngaaaaagaatgacccccaatgcttggggaaaagaaatttgaaccaaattggaccagctggaaatcanatgatagccatggcttanaaaaacaatggtcccccggtncanaaaaactggactnttggcgnatcannggaatacncgaaaggagcttntcncccttggggaaaaaaaaaaa

SEQ ID NO: 2425 - DNA, 121 bp, Homo sapiens
  misc_feature (1)...(121): n = A,T,C or G
gaacagacagagctgnggatcattncactaagnacttcactgacgcgnggctgaaggagctgtntggactntctccnagtccancagtcgctgggcaccacgaaagaactgcataaggagc

SEQ ID NO: 2426 - DNA, 160 bp, Homo sapiens
  misc_feature (1)...(160): n = A,T,C or G
ctgaggagacacacangtgcacgatgctactgaaacagtanatcttccntgncaagnngctgcactcangcttcctnnatncttggagtgactgcgactagnagagcctgccctacnatcatggctggcccttcctgaaggncaataaagagtgtgaaac

SEQ ID NO: 2427 - DNA, 380 bp, Homo sapiens
  misc_feature (1)...(380): n = A,T,C or G
gcaactgggaaacaagtctncctggtagcatccacggngccaccccacgcatnaagagccaatcagggatgtgtcgccccgcccatgaagaccttcgttatgttccgtggaaaaaccacggtgcttgggactcagaacatttctctcagtcgcagagcccttgatggagccaaggataccttgccaccctacagaggactcggggttccacattcgctccctgccagcctacctggtccccagaatgatcctaaagcccaggggagctccctgaagcctggagctactgaaaagcactcaacccgggagaaggtcaaacactcactgaaggctctgacctgtctctgcgggcaggtggagtagtttcataggatctgtca

SEQ ID NO: 2428 - DNA, 402 bp, Homo sapiens
gtccaagaagttggctgccctaaccgaagccttgaaagcagtctcgctcagtaaggcccagctggggttagagttgccagaactggaagccgccgcactcctcgtccaggaggaggaaggtgctggaagagcagcccagtgcaatccctcgcatcaggctccacactccagtcccgagcccagtgactcggacagcacctcatcctctggcacagaggactcagcgtcagagcaagaggagcctgctgggacccagccctccctgctcacttctctgcaagccccacttttggaagaggacagtgccctgatcatcagggagagtgggctctgcagaaacatggccagccaggggatgtgaagcagtcaaggacaagccactggcctccggccgggctcttt

SEQ ID NO: 2429 - DNA, 104 bp, Homo sapiens
  misc_feature (1)...(104): n = A,T,C or G
acttttacaagtctacctgttcgagaagaantgatggcnaaatactcanacctttccttaaagagctgtaatatctcagtgactggatgaagtccaatgtatca

SEQ ID NO: 2430 - DNA, 333 bp, Homo sapiens
  misc_feature (1)...(333): n = A,T,C or G
gttgtcttgtggaaatgcccgtgtgaggacgagctgcctaccacgtagaagatgggatcgaacagcagcaagatcagtgatcttccgaaaaacgagtacttaaaaaagctgtcaggccccgagtctatatctgaaaacgaccccttctggaatcagctcttttcattttctttccccgcaccaaccagcagttctgagttgaagctattggaagaggcaaccatttcagtttgcaagtctttgggtaaggtgggaagggagagaaaaacaggcagtttctaagattttntgttaaaatttttaatagtntaataatatgagttgaattaaaaa

SEQ ID NO: 2431 - DNA, 394 bp, Homo sapiens
  misc_feature (1)...(394): n = A,T,C or G
cctcctctcctcagcgatcctgactccagtctctctgacagcgaggagagtgtgttttcaggcctcgaagatttgggcagtgactcgagtgaggaagacactgaaggagtggccggatccagcggtgacgaagacaaccatagggcagaggagacctctgaggagctggcacaggtgggtgagggaccagcttccatgggctctcctgcacatgaggatggccagaaagaggaagtgcctgcctgggagctgtccgcttcacactgtccccttcgtggtgtcctcgggaacctggtcctctatccgtccctngtcacacatttgancttcaagggttggnaacctcagttgnctgtgcctttcctgagaatgacgaatgcccacgtgctcatgt

SEQ ID NO: 2432 - DNA, 374 bp, Homo sapiens
  misc_feature (1)...(374): n = A,T,C or G
tgatgagaccctacccagtgattgntggaattacaaaattcacggataactntgctggtctnagcatgtagccctgcctggaaatcctgcctcagagtctcaagtgctgtgtgacagntttgatgacancgtaggngctgatgnatcnatncggatatgcncctgggacagnccccanccatagctgncntnacgactagatgncatgnacctnctcatggcnatcacagccnctccnncccagcaatgccacttccaggaattgatcctcacaaacagagtagctctgacataggagttatttattgcagtgtggtttgtgatattaatgtagaaatacattccatcaataaagatctttcagttaacattag

SEQ ID NO: 2433 - DNA, 182 bp, Homo sapiens
gatggctgcagcaactcctctgcggatgaggtgaacacctccctgaccacaaccacgaccaccactagtgccttcaccatccaggaatattttgccaagagaatggcccaattaaagaacaagccacaagcctcagctccagggtctgacctttcagagacccctgttgaaaggaaaaaaaa

SEQ ID NO: 2434 - DNA, 387 bp, Homo sapiens
  misc_feature (1)...(387): n = A,T,C or G
gtagatcggttgctggcagaggctgactttggacccccagatgaaagggacgacttggacggtttgaggaacgccgatgcccaggtaccacatgactccccagaaccagccgcacacccaaatctgtgtgggattgaccacgaggcgctgaataagcaaataatggagtacaaacgcaagaaggagcgagggcttcagtgtcagagtctggcgccaccatcagggcgggagcaggcacctgaaccgacccgtctgctccggaagagagagaaggtgcgatcccggtggcaacaccgggacgcttccccagaaagctttcttttgggcnnaggagaccaaggacgaaggacagcagctcanagtggggaatgccatgcccacgaggca

SEQ ID NO: 2435 - DNA, 176 bp, Homo sapiens
  misc_feature (1)...(176): n = A,T,C or G
gactacatcacttactngcctgtggaactgaaccgtggacctnnacgaattcaangctgacacagtcaggcttcaacgaccagagtctcctcggcactgagctcatctcagggtagaccccgatgttggttcccatgaatccttgcctgtgagaataaaaggcagagtcacaaaaa

SEQ ID NO: 2436 - DNA, 138 bp, Homo sapiens
tggtgggccaggccgtggtaccctggtgatgcggggcgaggccccccccacagtccgctgagatccctgtgcccaaccctggcctttgccatggctccggtaggtccagagctgtctagacgcatgaataaaaaaaaa

SEQ ID NO: 2437 - DNA, 281 bp, Homo sapiens
  misc_feature (1)...(281): n = A,T,C or G
gtcccatggctgttattggctcccttgctgtccccaaccgttcctcaggtcacctccccaccttgctgcctatgtcccgagggtntgagagggccnaacatggaggantgcagaaccaaggactccgnggggactctgcntgccggaanggctctgnggntgcattttctaaaagcttcatctcatccttntcaatgtcagnggcanaaaaaactgaccgnagctcaaatcccaacantgggnccttcctnanccctcctgggtaatggctactctctggg

SEQ ID NO: 2438 - DNA, 634 bp, Homo sapiens
  misc_feature (1)...(634): n = A,T,C or G
ggacatggagctgtgtttgactgcaagttttcacaggatggacaacattttgcctgtacagattctcacgggcatcttctgatatttggctttggatgcagcaagccatatgaaaagattcctgatcagatgttttttcatactgactaccgaccactgataagagattccaataactatgtcttggatgagcagacacagcaggcacctcatcttatgcctccaccattcttggtggatgtggacggaaaccctcatccaaccaagttccagagattagtaccaggtcgagaaaactcagcagatgaacatttggttccacagctaggctatgtggccacaagtgatggggaggtgattgaacagattataagcctgcataccaacgacagtggagatgcaagcccagagtccagcgtcttggatggcatgattangcagctgcagcagcagcaagacccgagactgggagtggatcaaggatnggactgcaaatggactttcccagtgggggaaaggaccacccccgaaaaaggggagtttttagaaaaactgagttttagacaatttcagncttcctttcaaaacaattgggncnttcccgtcggnaaatggggccaaggttttaaaaggg

SEQ ID NO: 2439 - DNA, 109 bp, Homo sapiens
ttggactaagcgaccttgaatggattcgactgactactaccaagtggaaccgatcatgctagtctttgtacgcaaagaataaaaatgtgaagaactttaaaaaaaaaaa

SEQ ID NO: 2440 - DNA, 266 bp, Homo sapiens
  misc_feature (1)...(266): n = A,T,C or G
ggcctacaaatgtgacggtgtgtaacaatggcctttacccatntggtgttcctnggagtcccacctgaagaagatncaccggggtacagcagcantatgccnacatngcagngtagagacanactctacgtgtgtgaggattgcggctacactgggcccnaccnangangacctgtatctgcatgtgaacantgaccatccagggagcacngtttctcaaaaagacttccaaaaagntnggcggnccttatgcataacaagctgac

SEQ ID NO: 2441 - DNA, 302 bp, Homo sapiens
  misc_feature (1)...(302): n = A,T,C or G
atcgcaacgaacgacataagccagagcatcgttcttccagccaaggacccctgtcatccattagagcggtaatcaagagatcttctcggacctgtattcagagtgaacttcatcgggacaggaggcgtgnananaattatannatnnggtagatnctgatagcatnnagtgaagtagcatcaattggcagactgttttacctcataagcagtgctgtaccgacttctccctcatccacacatctctgaacccatatataagtttgacaaataaaggttttgcttgagagaaatgaaaaaaaa

SEQ ID NO: 2442 - DNA, 697 bp, Homo sapiens
  misc_feature (1)...(697): n = A,T,C or G
taggaacctgtagaggaccacccntgcaccgatnctactgaancaaagatnatnntcgtggtaananngcncgatcactatgccttcntaantctggncgtggcannanaatgcnatcnttgatcaanccanagganccatgcattgggctgaatgagggcaaacgttggagcancttncctgtcactgtttggagatccctatgagctggatccttttgacagcaatgaataacagtctgcagatccaccttcccctctgagtgccaagaggagagtgctgtcccgctcagctctgcagtctcaccagcctgtggccagacctgtcgccatggggctctctangaggcannttccttgctgtggcccccagagcccaagcgtgggaggaagcccccgtttcctgacctgtttgggaagcatnctgtctggccnnagcctcctgatgatgagcangtgcctgatgttggcattacacccgggatggntctnttaancgcccannaagggccnggggaaggaagantttaantcttccccttttccccaannccttngnaaaanntggctttgctttcgngggttgggaagncttttcttgngttcaaattccgttnntttggtcacnggncccanntggtttgggaaaccttggggggagncccnnnnaaccnntggcccccttttttaacctgggg

SEQ ID NO: 2443 - DNA, 370 bp, Homo sapiens
  misc_feature (1)...(370): n = A,T,C or G
gtgtgagagcagaaaaacggacttaagagctgancaggatgcgttcacggtgcaccgnctctgccgtcggtctcctcagcttgtgtcttgtggtgtctgcgagcctagagactatcacaccgtctgcttttgatgggtatncanatgaaccttgcactataaacatancantacgaaattcccggctaattntatcctgggaattagagaacaagtctggcccacccgctaactacaccctctggtacacagncatgagcaaagacgaaaatctgacnaaggttaagaactgttcagataccacgaagtcatnatgtgacgtgacagataagtgggtggaaggcattgganagctacgtcgtcgccatcg

SEQ ID NO: 2444 - DNA, 478 bp, Homo sapiens
  misc_feature (1)...(478): n = A,T,C or G
aactacaaagagcgagtttctacttcaatcttttcctctgcttggagtacatcagggtcaacatgaacaactggaggtcggaggataacttcaggccccccaccatatatagactgcaggaaattccatgtttcttctgaaatttgaccagagtctgctcctaaaattgtatgtatgcaaaaagaatgatatttacaaacatgaatcttaatatagcttttacagtatatccaacagagaaatcctctatggaggactgagaattctgaaaccttcagattatcagcctgtatgctataaaaaacaatatggagacggtttccaaatgtctagagatccattttccaagctccaacaaccctaaaaccttcctaaaaataagaaatttttaccctttctgttactgtaagcctgaccatttctgaactaggtaaataaattacataatagctggttatnntttttttaaaaaaaaaaa

SEQ ID NO: 2445 - DNA, 158 bp, Homo sapiens
  misc_feature (1)...(158): n = A,T,C or G
ctcccttgaagggggntggggctatgactttctgcccagcctagagagctgtatactcccatttcatggactctgcttgagtgtgcaggttttacatgaattctatttataccttttgtatgccacataaataaagataatttatataaagaaaaaaa

SEQ ID NO: 2446 - DNA, 321 bp, Homo sapiens
tcatgcctacagtctgcccatagttccctggctctctgaaagctcctcagagctctcttctcaggataagaaccccttggctatgcttgcctcccgaagcccatggaatggcttccttcatgaagataagcagagtcccttgaaagcaagctttggatgagttctagaagcatcctgttttgagacacgccgttgaagatgcacccctgctctgcagttcccctccacgcacaggattgaagaagtaaaagctcctatacagaaggtttcacatctgagcagcagagtcggttcagtaaaaccctctgatacaaaaaaaaa

SEQ ID NO: 2447 - DNA, 124 bp, Homo sapiens
  misc_feature (1)...(124): n = A,T,C or G
tcattgcttccccggaagctggacagactaactgctgctgtggatgaactgagagccctctcngccctcccntctagctcccgcttgaagtctcctgccnatanagtgcaaccatcaggaaagt

SEQ ID NO: 2448 - DNA, 771 bp, Homo sapiens
  misc_feature (1)...(771): n = A,T,C or G
gtgaacctgtcaaaccttttacaccagagaaagcgaaagagattataatgtctttacagcagcctgcaatcttctgtaacatggttttcgattggccatcacgacactggactgcgaaacacctttcgaaggtcttggagggcaagcagatacggttcagaatgggcctgagaggcacaggcacagttcctcagtatgaaaccgaatgtagttatgtggatgcgacgctcgaggagtttttgacctggaactgtgaccagnctagtatctctggaccattcaaagattatgaacattctaaattctgggcttacgctgactataagtattttgttactctgtttgaggacaagacagatgttttccaggaggtggtgtggtctgactttgggtttnctgaangaantggacnagaaagtacactgtggatcgggtcctttggagcccacactccctgccatctggactcctatggttgcaacttagtattcaggtacaangaangaaaagatggcatctctttcctcctgaagatacgcctttcctttatncaaccagaattccttacgaagagtctagtgtgttcaagtaaaatcaatggtgcaaccctgatttgaaagcgtttcccccagttccagaaagctcgaaagacatatgggcaccgttgagcccaggacaaggttctggttggttcccanacactggtggcatttacnttggaagnctctttgancctgtnacccgtcaagantaaaactcctgggaattgga

SEQ ID NO: 2449 - DNA, 736 bp, Homo sapiens
  misc_feature (1)...(736): n = A,T,C or G
cattccgctctgagctgagactctgctgcttccatggctgcttccttgaagacacgcacagatgtttgggggtgaagcacatctgtccggtcctaccctgcccatagaagacggggaggtgtcatacctatgatgtggccagtggctttggagccctgaagcctcaactctctgcttggatccacgtggtgacagacacacgtgctagacctgtcagtgttgaactacgtgtagagtgggtggggaaggagatctcaaccccgaggcacagataacgaacaacctggggcagctgggaggtgactgggcgtgccattcatccctgagaggttcccaccgaggcagagatgtagtcctcagacgttaatcctggaaaggtggctcagcagttgaaaccgctggttgcttttccaaaggaccagggttgcttcccaacaccccagtcaacttgcctatagtcctagcaggcaagagagttggaagttcaaggccatcctccgctgtataggangccactataggctgcatgaaagccagcctcaaggaagaatgacaaagggggctggagtggcgcttagcagttaggactgntcgctgctcttgcaaggacctgggttcggttccaggacccacattctttatggncatgaatacttcaagatcccaagaggagatctgatgccttttctggggcctaanggcatctataccatgctgnataacttaaccgaccctt

SEQ ID NO: 2450 - DNA, 261 bp, Homo sapiens
cagaataaagatgcttagaactctagaagccaagagactggcagccatggaatcctctgtaaatctcccagcaaggtctcccaagggtggtggagcccagcagactactagcacaagcagtcaactgaagtctaaaggtgggcgatcagatgaagacggaccaccttccacccgcagaccattctacaagactagagcagactttctcaagagacatcgttaactcaatacaaagaccaagtgagagcagcaaaaaaaaaa

SEQ ID NO: 2451 - DNA, 258 bp, Homo sapiens
  misc_feature (1)...(258): n = A,T,C or G
acagtgcctgctctggaanatgtgactatgacattncgatnaggaccatggcnnacagtcatgtnagganacanctggngnncnttcccgngcncataaagcatnanttacatntnaaactganccnatagganacacttatcgataaatcccatctgactcctnaatgtttacatagtccctgtccacatggaataaagcacacaagttatttcaccanaaaagaagaacatngcngacagtcatgttaggaaacaa

SEQ ID NO: 2452 - DNA, 113 bp, Homo sapiens
gtcttggccggagaccggagccatgtctgtgttatccccactgtagacaatccttgcttcctctggacatctggagcaggcccaatttgactgagagccttcccccactaaga

SEQ ID NO: 2453 - DNA, 523 bp, Homo sapiens
  misc_feature (1)...(523): n = A,T,C or G
agagtctgttcctttgtttctgtgtttgggtttgataaaatccaactccacgagtggcttttgaacttggaatagtggcaatctgctcaagctccagataaagggaaacctaatttgcattctttccgtgtctgccgaaagactcagaaacggatttccaggactcaggaagccaaataccaagtgtaggagagaaaaagcagcattttccttaccaatcttaagcctgaagggtaaggattccaagactaaaacatatacatttatttaatgtcagttttgtgttacacaagagatcatcagaaatttggaaatctttgtgcttttgtggactgccatgcagaagtttgactagaaaaccacaggggtacaatatactcataaacttgaggccagcaatgtagcaaaacccatttgntcatatttttttcctgtgtcttcatacagtcttttcagatataggaaagatatctctaaggggagcaactcaaaacattttaaattaaaaaggaatttttaatta

SEQ ID NO: 2454 - DNA, 267 bp, Homo sapiens
atgtgattatttttcttcctcaagaaatgcttctcggtagttaatacattacggaaggaaccgtggagaagcggtacgcaaactgcacagttcgtgccgcttgagcaaaatagaggtcggtcggaggccgaggttgcctcccttcgaggtggagaacaacttcgcagcccacagccgccggtgagtgttgcaagtttggcgggggtcttgctgagggtgttttcccgcccccttctctttccccgggtttgttttgaaaaaaaaaaa

SEQ ID NO: 2455 - DNA, 214 bp, Homo sapiens
cccaggggatgccccgggtgacgccgccgctgctcttcaccgaagatattcccgtgcttgctgagccttgccccgctgtgcgggtgctgctaacttattggaccgtatttatattggttacctgcttccaacccaccattccgtgttaatattttttataccatattttcattccaaataaacaatgtcacttttctttttttaaaaaaaaaaa

SEQ ID NO: 2456 - DNA, 129 bp, Homo sapiens
gtttggagtcttctgtgaacccattacgtggatgcatcacaagaactccattagtggtcaagccatccatctgcccatcagatgtcttccacttggcagccttctcctataaaatcaacaataacaaac

SEQ ID NO: 2457 - DNA, 405 bp, Homo sapiens
  misc_feature (1)...(405): n = A,T,C or G
ctgtactggagctgctctgnagaccaggctgnnccctgatgcaggagaaacacctgnctatacncccagagtgctgacattaanngcntgantcnccaccanctggctangaangngacntttatnccacggaancctgaagaaggcnacntaggctccagctgannccgangaccggantnggncaccagngttagctttaaaacancaatggancccacntntngacnctcccgggcacagctgcacacctgccgcctctacccaggtgcaggccttctgagaacaaaaggacacctactcaccaaggtcattaccttgatgggggcagggagaagggctgggaatggaagaagacctctagtctagaaaattggttgaattaaagggtttgaatcagcccca

SEQ ID NO: 2458 - DNA, 105 bp, Homo sapiens
gtcttctaagatcaagtaggaaatgtgaattcccaagaacgtgggggaaaatgcaaaatttcccaaactatggaataaacatgtttcctaacctaaaaaaaaaaa

SEQ ID NO: 2459 - DNA, 426 bp, Homo sapiens
  misc_feature (1)...(426): n = A,T,C or G
actgagggatcagactgagatcctccnaggcacatgtgacccatcaccccagacctgaaggtgaagtcaccctgaggtgctgggccctgggcttctaccctgctaacatcatcctgacctggcagtgggatgaggaagacctgactcaggacatggacctcattgagaccagacctgcaggggatgggaccttccagaagtgggcatctgtggtggtaccttctggagaggaacagagatacacatgtcatgtgcaacatgaggggctaacccagccccttgttctaaaatgggacccttctaagcacaccattcccatcatgggaatcactgttggcctgcttctctttggagttgtgtttactggagctgtggttgccatagtgatgaggaagaggaaagggtctcacactgtacccttaaaaa

SEQ ID NO: 2460 - DNA, 270 bp, Homo sapiens
  misc_feature (1)...(270): n = A,T,C or G
cgaggaaatcctttacatttatgccnagagcggcttngaaagatccngaagctntggcagnaggataanatcacagaggagatcggacacncncangaggctaaccagaccctggnnggaattgactggcagcatttataatcgctcctntactaanaacttgacttggagttttgtaacacagctggcttttccagaaagacaacaggaaataagttcggctgaatctattttgaaataaattctttatttaagctttaaaaaaaaaaa

SEQ ID NO: 2461 - DNA, 195 bp, Homo sapiens
agactgagacctgtgctaccagaagtgacaatggaagtccctcctgtgaagaggaaaggacactgacaacgtgtggatcctcaggagcaaaccaagtcagcagacatggtaaatatctgcttacaataaaacactgtttctatccttctaggctctattaaaagatgtatggatagttaaagcataaaaaaaaaa

SEQ ID NO: 2462 - DNA, 105 bp, Homo sapiens
gtcttctaagatcaggtaggaaatgtgaattcccaagaacgtgggggaaaatgcaaaatttcccaaactatggaataaacatgtttcctaacctaaaaaaaaaaa

SEQ ID NO: 2463 - DNA, 272 bp, Homo sapiens
  misc_feature (1)...(272): n = A,T,C or G
ctggagagacacgtgccctatgacaacagcagaccaaccagtgggaagatgaactgcgacgtgtgcgggttatcctgcattagcttcaacgtcttgatggttcataagcgaagccataccggcgaacgcccgttccagtgtaatcagtgcggggcatcttttactcagaaaggtaacctcctccgtcatattaaactggcncggggggaaaaaccttttaagtggtcncctntgnactacgcatgccanaggagagatgcctcacggattac

SEQ ID NO: 2464 - DNA, 415 bp, Homo sapiens
  misc_feature (1)...(415): n = A,T,C or G
gactgaggttcctcagtggtgtgctgaatattgcctttccatccattaccagcacgggggcgtgatatgcacccaggcccacaaacagacggcagtccagctggccctgcgggtggccgacgagatggatgtgaatatcgggcacgaagtcggctatgtgattccttttgagaactgctgcaccactgaaacaatcctgaggtactgtactgatgacatgctgcanagagagatgatgtccaaccctttcctgggtagctatggcgtcatcatcttggacgatgtccacgagagaagcctggcgactgacgtgctgctcggactccttaaagatgtgctgctggcaagaccagagctgaagctcatagttaactgctcgcctctcctcaccagtaaactcagttcctactatgga

SEQ ID NO: 2465 - DNA, 548 bp, Homo sapiens
  misc_feature (1)...(548): n = A,T,C or G
ctccatccgagcaggccgggaaacatgcccgccaggaaagagctgcgtngcccctccgagttcgacgataccttcgccaaaaagttcgaggtgctcttctgtggccgggtgactgtggctcacaagaatgccccacccgcactgattgacaagtgtatcgagaagttcaaccatgtganctgtggtcgcacaacggactgggaagcgcccnncgggcaagcntcngctcctggcccagcccatgcgcaaatccntctcacancctggantgcgctcgctggccttcaggaangagttccaggacgctacctccgcagtnncacctttanctccnttgacnatgacataganaaccncctcatcggtgggcacaatgtggttcacccacagacatggagganaaccgaactatgctgtgcacggtaaaatctgtcngttttttgcagcttgaggtctgaaaaatctgtcttacacatccatgtttgtaaacaccctttcctgcagaatatantnatattaaagaagtcaagaaggatgttaaacaatat

SEQ ID NO: 2466 - DNA, 334 bp, Homo sapiens
gaatcccaatgctgaagatagtgtttgcaggccatgagcatctctcgctgatatccgtgcccttgctcatctaccacccagctcagattctcctgggaagtgtgttagtgccaacaataaagtcttggatggtgtccaggcagaagggagtgaagctgacaaggccgacagtgtgactcgggtggcgccagccttcctggagtgtgtacatatatgtacaggctgtacatacaggggttctgaggacctgtccttggggatgctgctttgatgcctattttatttttttacagaaaaaaatatgatatacctgtttaagtgccttaaaaaaaaa

SEQ ID NO: 2467 - DNA, 996 bp, Homo sapiens
  misc_feature (1)...(996): n = A,T,C or G
agagaggcgaaccccattgcatgctgctgcctacgtaggcgatgtccccatcctccagttgctactgatgtcaggtgctaacgtcaacgctaaggacacactgtggctgacccctcttcatcgtgccgctgcctcccgaaacgagaaggtgctggggctgctgttggcacactcagcggatgtgaatgcccgggacaagctgtggcagacaccactgcatgtggctgctgccaaccgggccaccaagtgtgcagaggctctggcacccctgttgagcagtctcaatgtggctgacaggagcgggcgcagcgctctacaccatgcagtacacagtgggcatcttgagacagtgaacctgctcctgaataagggagccagcctgaatgtctgcgataaaaaggaacggcagccgctgcactgggcagcttttctagggcatttagaggtcctgaaactgctggtggcacgtggagcagacctcagctgtaaagatcgaaagggctacnggctgcttcacacaagctgcagccagtggccagattgaaattggtgaagcacttgcttccgatggggggcccgagaatccgattaancccaatgctttttgggaaaacacaagcttttgcacattngctttggctacctggggcccngggattgcttgtgggctanttcgaagcccttggtggaacccccanggaaaccccaaatggtggnaaccccanccccgaaattngcnccaaangggggcntttaaacntttccaaccttggcaantttntggnccgggntttngggccttntttaccccaaacnggggngcctttttnggggaccntngggnaaacttggttaagnttnaaatnaaatgggggggcctntaancgtttnaacnttaccncnnantttaaatgnaaangggaaaaaagttcccctttggnccnatnggcttgccaattccaatggggccttntttnaaaggcggtttcccaagaa

SEQ ID NO: 2468 - DNA, 172 bp, Homo sapiens
ctgccaactaaggtgtctctgactacgggtcttttatttgctacatatatatttttacaaaaatgaaatccatattgtacgctattttgctgtctgcttcgttcccatgtcaacatgacctgcacttcttttcccatcaataaatgtgttgtgatatttttaaaaaaaaaaa

SEQ ID NO: 2469 - DNA, 327 bp, Homo sapiens
actgaggtcctgagggaggcaaacaagttagcagaaatggaggaaccagccctgcttccaggagagaacattaaagatatgggtctgtaatgttttttgtctgcacagctgttcattctcctgtagtgtccagcctgtgttctgcaagccgagacccagagctgttgggagtgttcctgtctggatgttgggaaatgtacaaattcaatgttattctctttaaattgttgctgaaatccgtgaagagcagttttattatttgaattacatcatttagccactgtgttggctagctaaaaacattaaacaagtgatttttattaaagt

SEQ ID NO: 2470 - DNA, 617 bp, Homo sapiens
  misc_feature (1)...(617): n = A,T,C or G
gactggacccaaaaggagagccagtggtgtggtcggcaagtggttggacagctcgaatcatccagcatgagatggatcacttgcagggctgcttgttcatcgacaaaatggacagtgggacatttaccaatctccactggatggaggtgaatgactaacactctccttgaattgaggatctggaaatccagcatgcagactaagatggtcacatctgtgcttcagcttggaattggttccagtccgacagtagacagtgtgtgctggtctgagatgaagatgatagaaatgcttgccctgaaatcagatctgacagaatacgattacagcaggactacaaatgtaccattaaaggagtggctatttcctgacaatttcccatggagaggagtgggcaggcaaacatcctctgtacaaatgagacacattctaaccccacagcctacaattgattgataaggnaatccagatatccaaaagatttgntttttgagacagggnttctntgngtaccttggntgcnnggactnactctgtnnacaagctgcctnaacttaananattcctgctntgnactcctgactttggactgaagggnntncctctgtggcttgaag

SEQ ID NO: 2471 - DNA, 529 bp, Homo sapiens
  misc_feature (1)...(529): n = A,T,C or G
aactttgttctaccccaagagatgatcattgaagtggagggagaagatgctgggtcactggacatcatgcctcaggaaagcacagacttcaagattgtgactgtggaccttncagaggagggacagagcacgtggaacaatgcccagagaaccccagagaaaaccgtgatcctggaaggccacagggacctgtgggacttgccagctgtacatggaacagaaggagccaccgcaaagcagacaatcttccatgaagaaccatcccatggattgaagctagaggggttggcaagagatgacccttggctgtcatcgtgtgaagaagtccgagactgtaaggagcagtcggggaaacaaccgaacaagcaagaggaggtggcctttacccagggtagcgctggctctcctgatactgtctacaggggtcatgaccctgacaggagttgcctgagtaccagccggccttcattccccatgatgccccttagaaaccatttncataaacaggcgtcacatgttaaaaaaaaaa

SEQ ID NO: 2472 - DNA, 106 bp, Homo sapiens
aggcagatctgacaaattctggcagttctccctctgaggatgatgccctgccttcaggttctccctggagaaagaagctcagaaagaagtgtgagaaagaaaaaaa

SEQ ID NO: 2473 - DNA, 638 bp, Homo sapiens
  misc_feature (1)...(638): n = A,T,C or G
caaatcatcgagagtcagtggaagcagcgggaacaccattcattataagttctttggtgagtttccctctacatagcgaagaccattaaagaagcgagaccagcgaagtgttgcacagctagtgaagaccagcaaagcatcgcataaagncngaatgcaagagcgtcctctcactgtctgaggggttccatttatactctctctgaatatcatggaccctctaacggcgtctgctccagcaaaacatcatcacatgccctctcgagtctgcttcagcaaaacatcctccaaagacagcttccagaaaaacatcatgggacacaaccaagtttccaaaagaaactggaaatggaaatttccactttatcagacatttttttaaaattagtttttaaaagtcatattagagaagcagaaatccaatgagttgcctctgattcagtctgtgcagnttggtctcaagtatatcttaattcttccctgtgaggactacaagaatagtgtttaaaatgatacagctttagacttggagtgagtctagagtagactgcttctcactataggcttatataattgaacatatacattagatctggcctgttaaactgnaatcatttggataaaatactttggtattg

SEQ ID NO: 2474 - DNA, 147 bp, Homo sapiens
  misc_feature (1)...(147): n = A,T,C or G
agcggctggatgacatttgctctaccaacaacagccatggaaaagatacaagttctcacagnagaatctgacatcanccaatgantgaatccattacatgaactgacactgcgaattcanaattcaaggttctgcttttccaagcta

SEQ ID NO: 2475 - DNA, 744 bp, Homo sapiens
  misc_feature (1)...(744): n = A,T,C or G
gctcctgctccaaagagcacgctcgttcccgctggccccatcaccaagtcgtctggttctcggttccggaacagtgtggaagggctgaatcaggagattgagatcataattaaagagacgggggagaaggaagaacagctgattccacaagatattccagatggtcatcgtgcgcctccgcccctcgcacagagaagcagcagcacacgaagcattgacacacagacccctgggggtgcagacaagggaagcaacaacagcagccgctctcagtctgtgtccccaacatccttcctcaccatctctaatgaaggcagtgaggagagcccctgttcagctgatgatctgcttgcggatcccagagataaagagaatggaaacaattctcctttgccaaaatatgcaacctnaccaaaacctaataacagttacatgtttaaaagggaacctccagagggctgtgaaagggtcaaagtctttgaggaatgctcgccaaaacaacttcatgagattccagccttttactgtcctgacaaaaacaaggggaatttcatttctnaaagnggctctgctttctgcctcgtgagnatnctcnaaccacttttcccttcaccagatcttactcttaanggcttttggttacaagcctgncccgttnccactgggatgaccaccccttttgnttcaaggccatnttttttggcctnccttgtntacaaacacaaaagcaagaacgggtttttt

SEQ ID NO: 2476 - DNA, 105 bp, Homo sapiens
  misc_feature (1)...(105): n = A,T,C or G
gaaatgagcaggtttgcagaaagactggtggcctaaaactgaagcctaaggagtcggtgcttggctntggctgagaacatggccaatgacattgaaaaaaaaaaa

SEQ ID NO: 2477 - DNA, 190 bp, Homo sapiens
  misc_feature (1)...(190): n = A,T,C or G
gcctgtcctgcctgctagtcccccacccanagacaanactccgctccacaccatcccacggnagcgtaagcagcctcaacagcacaggcagcctgtccccgaagcacagcgtcaagcaggtcagtgcccaaggcctcttgtatatcatttctcatcagcaataaagagaaagctttgatcaaaaaaaaaa

SEQ ID NO: 2478 - DNA, 138 bp, Homo sapiens
gacttcctgatgtcccctctcttgggttggacctgtgtacctcacagctgccttggaaccagctcacccatgctcctacctctttaaatctctgaataaacagaactgcctcctgttctttgagtgacaaaaaaaaaa

SEQ ID NO: 2479 - DNA, 346 bp, Homo sapiens
  misc_feature (1)...(346): n = A,T,C or G
ggaagtgtaacatctcccatttttctgacatatttgctgctcgagagtttaaagcccgagtggactcatttttctacatattaggatacaaccctgagacaagtttgaacgttcagagtctcggnccacctgcttggctgactggctgctcggcttgcacggcgttgtggtacagccacctgctttgatggaagatttggagttcctggctctgctttgtggtgacctctgggtttccgagttgattttacatgcattgaaatcagcaacactgctttctctgnttatgcatttgntctttattctcctgtcttgagaaaatacatttttggggaaagttaaagaa

SEQ ID NO: 2480 - DNA, 152 bp, Homo sapiens
gactgagaattggcacagaaagaggaggaagaagatcctcttgctgaagaaaaacgactagaagaagaaaggttgttagaggaagagaggcagagactgcatgaagaatggttactgagggaagaaaaggcacaagaagaattcagggcaaa

SEQ ID NO: 2481 - DNA, 402 bp, Homo sapiens
  misc_feature (1)...(402): n = A,T,C or G
tggcctctgtgaaggaaagtccactctagtccctacctgcatatctcagccttgcttacctgttgcgaacattgggccaactcgaattcttcccaatctctatcttggctgccagcgagatgtcctcaacaaggacctgatgcaacagaatgggattggctatgtgttaaatgccagcaatacctgtccaaagcctgacttcatacctgaatctcacttcctgcgagtgcctgtgaatgacagcttttgtgagaaaatcctaccatggttggacaagtctgtggatttcattgagaaagcaaaagcctccaatggctgtgtgcttatccactgttanctgggatctctcgctccgtcactattgctattgcctacatcatgaagaaggatggacatgtctcc

SEQ ID NO: 2482 - DNA, 156 bp, Homo sapiens
  misc_feature (1)...(156): n = A,T,C or G
gactgagatggacagtctgaggctgagagagggctagtgatttctcggacacttgggcagtaggtaacgttatgaccgatgaattgggcctgaaatanagcatatatccgatcatcagggcttctcctctgcagctacatgcaccccaaaaaaaaa

SEQ ID NO: 2483 - DNA, 388 bp, Homo sapiens
  misc_feature (1)...(388): n = A,T,C or G
ggaagtaaaaggatccagagagaaggtcattagtgacgaagatctagaattactgttggatcgaagtgatctcattgatcaaatgaaggcttcaagaccaattaaagggaagacagggatattcaaaatactagaaaattctgaagattccagtgctgaatgtttattttaatgtagaactaaatggcttttaaaaactttggtttacatccattctggtaatttgcctgttggctttgaaatccatattgttcactttacttttataatatatcagtttttataatgtaactagtattgcatacttgatgaaaattttgngggntttacctaagtntaaaattcctataaatttaaatttttcagtnagtttttgggactgggtagt

SEQ ID NO: 2484 - DNA, 124 bp, Homo sapiens
  misc_feature (1)...(124): n = A,T,C or G
ctgccacacagcccanggatgcccttnctggtactggcacacagtatttattggnccnanaatgactgggattgggctctgagcatnccngntccctgtctgccctatttcagggcttgtccta

SEQ ID NO: 2485 - DNA, 403 bp, Homo sapiens
tcctactctgctgtatcatggaacccgggaggaccgtcggaaattagtaaagaatatccacaaaagacaagggacactgcagattcatcctgtggtggtcacatcattcgagatcgctatgcgagaccagaatgctttacagctttgagtcttggtttgatatcactagtctttctgaaactgctgaagatattatagctaaagagagagaacagaatgttttacatatgctgcaccagattttaacgcctttcctactgagaagactgaagtctgatgttgctcttgaagtcccccctaagcgagaagtagttgtttatgcaccactttgcaataaacaagagatcttctatacagctattgtgaaccgcacaattgcaaacatgtttggatcccgagagat

SEQ ID NO: 2486 - DNA, 145 bp, Homo sapiens
cagactgaggtgtattccagagaacaattttgagatatctttgcttatatttgacattgagcagtcaggggatttaggcatatgaggaggtactgtcacataaaacagtgtctagtgaagacgacaagaaagagagaaaaaaaaa

SEQ ID NO: 2487 - DNA, 453 bp, Homo sapiens
  misc_feature (1)...(453): n = A,T,C or G
gtttgggaaaagggaagtaatgacangntgncacctgaactaaatctttcatagacnacnccntnccagatcttcangangaanggggatatgccccangnccncataactaccctgtgcggggattgctagttttacggacctcctgaaccagcgtgccttctcccatctcctttacctgctacaactacaaanagcctcctttttanttcccgantaccaaaaaaggggganactgctttttgggccttgnnagggggaaagaacaattgtgggttttaaacaagntntgnnccataagtnttcaacccaggggttttcaccagnattcnacataaaaaacctggaanagaataaacctttggcaaggggatnaatcccccgaagggcagaatanccccccgttctttgttttgcaaggcccgctccttgggcaaaggggatttcccaaaa

SEQ ID NO: 2488 - DNA, 143 bp, Homo sapiens
  misc_feature (1)...(143): n = A,T,C or G
gactgaggaattcacatgncgacaaaaaaagacatttttcttggtagctgaacaaaggctgaaggactggcatnacnacggnggctatcctgagggaccgcacatggcgtacgatatgganaacacgggaagccttaccccat

SEQ ID NO: 2489 - DNA, 507 bp, Homo sapiens
acctgagccctgggcatctctctagaagcggtgcgatcatggaggtggtgccggccgaggtgaatagtttgcttccagacgacataatggacactgctataacgttagtggatgaggatagtattgaggctgtaattgtgtcatccccaattcccatggagacagagctggaagaaattgtcaacataaattctaccggtgactctacagccacgcccatttccacggaaccaatcacagtgtacagtaaccacactaaccaagttgcagtgaataccacagtttctaaagcagattctaataccacagtgaaaccagcatttccaagtggccttcaaaaacttggtgctcagactcctgtgactatatcagccaatcagattattttaaacaaagtatcacagacatctgatcttaaacttggcaatcagacccttaaacccagatggacagaaagttaatattaacaacttttgggcaaagtcttggttcaacaaattggtttaa

SEQ ID NO: 2490 - DNA, 154 bp, Homo sapiens
gactgagaaccctgagcctggaggttttctttccccccctcctcctgaggcttagttgatttggagttgtcatggcaacatttttagcaactgtgttgctctacaggaagccttgctgaataaaataaagaagccttgaacatgaaaaaaaaaa

SEQ ID NO: 2491 - DNA, 280 bp, Homo sapiens
  misc_feature (1)...(280): n = A,T,C or G
gactgagcttaaattccctaccaggccaaaggtgagggttcctacaattcccatcacaaagcctcacaccatgaagccagctccacgcttaacacctgtaaggcctgctgcagcctcccccattgtgtcaggagccaggcggagaatagtgcggtgcatgaantgcaaagcttgtgtgcaaggagaatgtggagtctgccactactgtaggggacccctctagtttctgtaaatattgaatcagtgagtgaataaaaatgtgctaataaatgaaaaaaaa

SEQ ID NO: 2492 - DNA, 126 bp, Homo sapiens
  misc_feature (1)...(126): n = A,T,C or G
gactgagcagtccccccaccagcctctgttgtctgtgtggtcttttcccattgccagtccttggganggntttctatttgtcctgccttgagcctattaaacagcctcccccgtgaaaaaaaaaaa

SEQ ID NO: 2493 - DNA, 134 bp, Homo sapiens
  misc_feature (1)...(134): n = A,T,C or G
ttcaggatcccccggtgatgactactcttgagggncctccttggggggtnanctgggcnncnntggccaaagaaaggacaaaagcttttngggggatnangttaatttaaagactttttggttcaaaaaaaaaa

SEQ ID NO: 2494 - DNA, 565 bp, Homo sapiens
  misc_feature (1)...(565): n = A,T,C or G
aagccatgcttgttttntggntgnaccccaccgtctgtatgtacagctngcctccagcttctatgacttctctttccttccctagctggcttgagccatcccgagaaacccatctctcccaaagggaaaacccacatagaaagcagagaggaaattntacaggccacaccatagggggccattcagagtcagagccaaggntcccccaaattgatgaccaaagtagttttcctgtatcttcagtttgcttacaaagtaggatgccattgatgccttacctacctaggtgcagaggccctcaattacctnctcacacggcctggaagccccgatcccctccgtcagcatcttgcctccttgcccctctagcatcagatgtgcttggtcacttacaccaggccatgaccttattctagaatgctctatgtctcaaggtgcatgcctagcgaactgggctctctggagtatnaaccagatgtttaaatacgggctcagttacctacaccctttttttgtcaaaattatccacttganatatttaagttcagaggaaaagttaacgggc

SEQ ID NO: 2495 - DNA, 446 bp, Homo sapiens
  misc_feature (1)...(446): n = A,T,C or G
ttgagacatagaaggcattcctcaananagtnntggnctgntgtaagnnaccaancacatnggatgctataggggcacaggaggctaagatgctgacctgaggggatcggggcttccaggccgcgtgaggaggtaattgagggcctctgcacctaggtaggtaaggcatcaatggcatcctactttgtaagcaaactgaagatacaggaaaactactttggtcatcaatttgggggagccttggctctgactcttaatggccccctatggtgtggcctgtanaatttcnctctctgctttttatgtgggttttccctttgcggagagatggngttttttccggnatggcttcaanccagctagcggaaagggaaaaganaaagttcataaaaaancctggagggcgancttgtaccanaccagaccgggtgggggtaccaacccag

SEQ ID NO: 2496 - DNA, 105 bp, Homo sapiens
  misc_feature (1)...(105): n = A,T,C or G
tagctggcctacaactcaccatgtatgccagaaaagaaatgtacctgtctctctgcttcttgattgttgggattaaagatgtgtnctacatcagcaaaaaaaaaa

SEQ ID NO: 2497 - DNA, 243 bp, Homo sapiens
  misc_feature (1)...(243): n = A,T,C or G
cttcctcttcattgacaagttacccagcaccgtggtttctcagttgtttgttttgaatgatactgatctttgcgttccgtgttacagacttggactccaggataatgagggtttaaattatccagatgctcattctttgccagtgncatatttacaaaatttcgtantttaagcctttaatttaaaaagcctgctttaaatactgcctgtgagtaaacccttgataaaaagacatgtgaaaaa

SEQ ID NO: 2498 - DNA, 172 bp, Homo sapiens
ctcctgcacacacgaagaaagcaggatcgcctcactgtgctgcctccaagtgttgtccccaaataccactgaccaaaaagcaggtgtttgcggatcagtgccccctggaagtgagtcataggcattgttcaagaaggaagcagctaagacaacatgaatgaacaaaaaaaaa

SEQ ID NO: 2499 - DNA, 115 bp, Homo sapiens
  misc_feature (1)...(115): n = A,T,C or G
gactgaggattctgatgcttcatgacatgccatcatgtagagcaataatgaacactggcctattttggactangcctggacaattttgggaccctccgtctcaaaggaaaaaaaa

SEQ ID NO: 2500 - DNA, 346 bp, Homo sapiens
  misc_feature (1)...(346): n = A,T,C or G
actgtatgggggcagccacagcatccacaactcccaggnccccagtctggtctccggagcggacagccccccctccagtcccaccggacacaactgggagatgaattatcaagaggcggcaatctacctccaggaaggtcaaaacaacngacaagttcttcacccaccccaaggatgccanagcgctggnggcctacctcttngtccacaaccacttnttctacatgatggagctgctcacggccctgctcctgctgctgctgtcgctgngcaagtcccccgctgtccccgtgctcaagctggacactttacgtccacgccacgctggaactctttgccctcatgg

SEQ ID NO: 2501 - DNA, 156 bp, Homo sapiens
  misc_feature (1)...(156): n = A,T,C or G
gacttggcaagcctgaggagcacccanaagctgggacanagccannctgancccgagcagacactgcagcccaggaggggctgccagggctcctcgtgaatcctgacaacaccgccatcattaaacattgctttctctttcctccaaaaaaaaaaa

SEQ ID NO: 2502 - DNA, 267 bp, Homo sapiens
gactgagattccagaatttgataacttgtacctggatatgaatgggattatacatcagtgttcccatcctaatgatgatgatgttcacttcagaatttcagatgacaaaatctttactgacatttttcactacttggaggtgttgtttcgaattattaaacctaggaaagtgttctttatggctgttgacggtgtggctcctcgagcaaaaatgaaccagcaacgcgggaggcgttttaggtcagccaaggaggcagaaaaaaaaaa

SEQ ID NO: 2503 - DNA, 583 bp, Homo sapiens
  misc_feature (1)...(583): n = A,T,C or G
ccagtgcaggtgcatggtaccanatggatgtcactagntgacctncccaaagcctgtctgacactcgagtcanactnattnttcntcntgtaaatgtgaaagngcaccttctctgcggngctcacaactcaagcttgatctgttccgggcatgcnaaggtggcnnggtgggccagctgacttacgacanacctgaagggcacagacttttgattttgattactgtaaatatttggnagtctgtgcttcttgngttaaaaataaattgntaagaccactaaatacctaaaagaaatctgtcctaagngggtaaaacttcggaaaacccacaacgagaagaagtcggtcctgatgctgatcctctgcagctccgctgtgcgagccctggagctcatcaggtctctgacagcattcaaaggagatgccaaaagttatgaaattatttgcaaaacatataaagggtccangaacaggtaaaagttgcctggagaaancgtgngataccacctgggtgtgggggacntccggggaagaattnaaanacttggtcaaaacnagaatgggctccatttgaaccccttaaa

SEQ ID NO: 2504 - DNA, 212 bp, Homo sapiens
  misc_feature (1)...(212): n = A,T,C or G
tgtggaactctaaaaggtacngacaggaagcatggcttggatccatatatntactgcctcgaatcgatgaattcgagctcggtacccggggatcngaagttcctattcggaagntcctattctctataaccgnatacggaacttctcgacctgcagagcatgcaagcttcgacctngacagtctganaaggantgagggctggatatgggga

SEQ ID NO: 2505 - DNA, 432 bp, Homo sapiens
  misc_feature (1)...(432): n = A,T,C or G
atagactgaggttggagcagccctacttcaacgccaacgctcagttcttccaggcactgggccagtgctcgtctctgcagcgcctgtgcctggtatctcgcagcggcaccctgcagccagatgccgtgctggcctttatggcccgttgcctgcaggtcgtcatgtgtcacatgttcaccggagaatcccttaccacctgcaagagcctgcagcagtcgctcctccggagtttccaggccgagaggcccgcgttgaacgtcgtcatcttccccctgctccacgagggcctgacagatgtcatccgagatgtccccatgctgcacctggatgagatnancttgntcaaaanccgtgtggntgatgaaccggccaacctatggtggtgaaaggaccttggcagccggccaacaagtcntgccgcacgtcaccaat

SEQ ID NO: 2506 - DNA, 342 bp, Homo sapiens
agactgagtcgagatttcttatttatcgttatcctggaaagccaccaactcaagtcacagataatggctttgaagacaagattattctctgttattcaaataatggccattatgattctgtatattcaaaagaatttcaatcaactgcaggaatttgtcaagctatattatatgaacttctttataaagatgtatttgttgtggatgaagaaacgttgaaaactgcagtcgatttatttcgaagtggttccaggagaaacaaacaccatgctttggctgcctgatgtaatctctctgggttgaggcattattaaaagtgtgatttgtgcctaaaaaaaaaaa

SEQ ID NO: 2507 - DNA, 240 bp, Homo sapiens
  misc_feature (1)...(240): n = A,T,C or G
gacgtctggggagctcctgcattaagtcaagaactgatncccctgtacaccgaanttgagaccggtcacagctcangcggccctagacgcttctggcacagggatggaggctggctggtcactgctgctttgaaagtcccaaacatctttgaacaggtgagaagaaactactttttcctctctttagacctctgacccagaagggatctgaacaaggaatctgaatttaaaaaaaaagaa

SEQ ID NO: 2508 - DNA, 292 bp, Homo sapiens
gactgagctttctccagaccagatcgtcttgcttttggagtggctcttagagcagaagacgctgagccctcagacactgcactgtctccagcagacttaccatctcccggagcaggatgcagagggacgtcctgactacatacatgtactgtggactgcccagcaatcgatggtgtgaaagccgtccttcctctgaagaactctctgcctgatctgtcctcagagcccgaccatgctgctctccgtctgtggcattaataactgaataaatctcttacccaaagaaaaaaaa

SEQ ID NO: 2509 - DNA, 454 bp, Homo sapiens
gggcaaaaaccaatccagacctgcactgccagtgaggaatacctgacctacacctaaagggacaaaggagtcaaggagtgtgctcgggagccatgtgcacaccgtccatcctgtgtgcagtgctgaggatgccgtctgaacgagggagccagagaacattgcagcatccgtcacccgcagctgtgactctgcagacttacagactaaaatcacagcaggatgactgttggatcctgcctcaccatcatctcccgttctttcctatgtgcattttctacagaaaggttattactgaaaagggagttggaggaagaggatgctatttaatctccaaatagccagccgcgtgttccacaaaactcctggccaagtggccattactgttcagcctggacctaggaaactgctatctttttgtccactgggagtacccaaaatttccttctgggacaga

SEQ ID NO: 2510 - DNA, 382 bp, Homo sapiens
  misc_feature (1)...(382): n = A,T,C or G
cagaagagaagcttatgtnataataacaccacttagaancaaaaaagntgatagagcaaagatgtatagactacagtctctctattgaaggaatatcggactttttcaaagcaaagcatcaagaagaaagtgactcagatatacatggaactccaagttctaccagtaagtctcaagagacctttgaacatagagtgggatttgaaggcaataccaaggaggactgcaatgaatgtgacataatcactgccagacatattcagataccttgcccgaaaagtatacaaatgctnaccaatgattttatgaaaaagaacnngttgccctcaaaactgcagaaaactgaaaatcnaatagggtgtatcacagtattgccggtcct

SEQ ID NO: 2511 - DNA, 770 bp, Homo sapiens
  misc_feature (1)...(770): n = A,T,C or G
actgagggaacaagactggcagacttgccgaaagaaacgtcatgnggttatgtancgtgttctngannaaggacttcggagtcacctactaggagtcttccctccctccctccctcttncctgcgcccagcatcatggccgntcgcctgatgaagcggtgtacctgcctgcttcgagaggctacccgcctagttcctactgttgccccagttggccgactgagacttgctggagtgtcctgcaagactttgacgtcctctgtcagttccccctcctcgggctccttggcggagctgttggggaaagagcaggtgtttactccgtacccagagcaccaagagctggacttcctcattgagaaagcctccagaccagagcagctgctggagctgctgggttctgaccatagcctgcaccacaatcacgcggccctcatcctcatccgcctgtcctacctgctgtctgagaagccaaaggaaaaggccttgcttgcaaaggatgctcgctttcagcgacttgtcaagctagttgatagtcaggaacctggtangnacttcagagacaagcagcccaacactggcctgctatcaggagtagaggagatgaacctgcttcttccagttccttgggacttnctgntnacaagcagancctttgacttaaatccctaccaatcttttnaanatctgggtgnccatttggacttccnttgaagccagaaananaatccanattggtnaatggaggnccctaaacctaggacttccttt

SEQ ID NO: 2512 - DNA, 408 bp, Homo sapiens
gactgagtcttgttttcagactggactcaggctggccttgaactcccagtgtagctgaggatgacctttcgctcatggacttcctgtttccacttcctaagtgctgggattccaggtccgtatcacctgtatgtatcttactcatatcaccgcattctctgagtacccatcccctttataatagcatctttggcttgggctgaggccccagtcagcagcatatctatttctttttgcttatcttcccatgttttctgtattgaaactattcccagtgtatagtgttcacatgagtccttttctcacttggtacctccctccatcatcaagttgctgagtgaaatgaacaatataacggtcccctaatctccaggagggactttttaaataaatgtgttttaaaatcat

SEQ ID NO: 2513 - DNA, 388 bp, Homo sapiens
gaggagcctgaagctaccgtggactctgctgtggcgtcttggcccccaggtgcggatcctccccagtgagaagtcccacgagtcttacagcaggtacggtccgctcgttggcgccccaggacagttttgcattagaacgttatcattcatttcaaccttacctaaccgatagccgtagccctccgtgctcttggtggacgtggtaagcaagcgctctgcctaagccgagccttgcgctatttgtaaaattcccaacgcttgtccttttttagactcgacagttctgaacagggcgtgtgatgggggtgtgggagggtagaggtcaaggctggccagtgagattgtctggctttttctttttaaataaattagctcacttaaaaaaaaa

SEQ ID NO: 2514 - DNA, 226 bp, Homo sapiens
  misc_feature (1)...(226): n = A,T,C or G
ccagcagactttacccttttggccagttttggagtttccctttgccggaaggttggatgaaggaaagagacctccagcctcagcgttctnctcacattctgagaggaaaggaggaagagggccatgctgtgnggnccaaggctggctttgcccggggaaggagccaaaaactcccggggaaaatgatggaagatggaataaatcaataaaatcagaccaaacaaga

SEQ ID NO: 2515 - DNA, 206 bp, Homo sapiens
ggtctaggttggtctggaagaagatgtgtagctgatgatgaccctccatcagcttacgatcctcctgcctcacctcccaggggctgagatgacatccacgtgtacccatggctttgtgcgtgaaccaccagcactgtatggcgctacctccacagccataaaatgctaacattttaataaatttttagctaattgaaaaaaaaaaa

SEQ ID NO: 2516 - DNA, 210 bp, Homo sapiens
  misc_feature (1)...(210): n = A,T,C or G
gataagaacctattacatttgttttctataaatggaaagtatctggggtctcaagtcctgagtgaacaaatatcagacatgtgcataattggagaacacattatcactggcagcttacaagggctcctgtctataanagagctccacagcttgaagctcagcgtcactccattanccatgcgannacctatccactgcgttttataacct

SEQ ID NO: 2517 - DNA, 338 bp, Homo sapiens
atggttgtaagctgctgtgtgtgctgggaactgaatcgagtcctctggaagaacagcagtgctcttaaccctgagtcatctctgccccatcctgtatatgtaaagccctgccttggtccttgcagactgatgggttcagaagacacttgtgtttcttggcttaaacacttctcctaaattccaggtcctgcacactctaagaaggaacttttgagtttccataccagtccactgtctccccctcctggacagccagaaccttgagagcccggctatgcagtcttgtttgtttgcccaccttactgtcaataaaggtgatgccatcctaaaaaaaaaaa

SEQ ID NO: 2518 - DNA, 371 bp, Homo sapiens
  misc_feature (1)...(371): n = A,T,C or G
agatctacctgcctctgctgatgttcctntggcttgtgctggctgangccagannagggcgtcagatgctcaggancnanacacacttactgacagctgnnaatctgctctttgggtggctggnnntncaanagtannaaaggcnnntaagnnttcttaaccncagangntaggngctngatganncctggcactcnggtttgngtggacctagggagaggtttccactctgcctttccccaaaactgattgcattctgagatctcagcattgagacccttaaaaagctccacctgcagttagttagaaacttgttgtcctgtgggagtcaaggaaaatcctccncccctaaaatatttgaaatttttatt

SEQ ID NO: 2519 - DNA, 424 bp, Homo sapiens
  misc_feature (1)...(424): n = A,T,C or G
ctgaggtggctggtgatagcagttgggctggtgagagcatacctggctaaggggagctaccatagcctttattattcaatagaaaggcctttgaagttcttccagacaggagccttactggagattttacattgtgctatagggattgtgccatcttctgttgtcctgacttctttccaggngatgtcaagagttttcctaatatgggcagtgacacatagtgtcaaagaggtgcagagtgaanacagtgtacttctgtttgtcattgcctggacaatcacggaaattatcccgttactccttttacacattcagtctattaaaccatctgccttatatcatcaaatgggccaaggtacacactttttcattcnnggctggaccccaaaggggagtgacngggagaagctcctcacaatatacc

SEQ ID NO: 2520 - DNA, 257 bp, Homo sapiens
  misc_feature (1)...(257): n = A,T,C or G
gggagccagacacccaangagaatctactgaaactacagcttgctaangttgtcttaacaaaagatagaagctcaacttgacaagattcgtctggatcccagggtaatgcangacaaacccacaccattttncatctgtgcgcacatacaagcatgngnntgagccagtaagcancgaggatggtaaagccaggtgttngacagcagancgtancatcattttcttacaataatttatttgtttctagacaagatca

SEQ ID NO: 2521 - DNA, 411 bp, Homo sapiens; identical to SEQ ID NO: 18
  misc_feature (1)...(411): n = A,T,C or G

SEQ ID NO: 2522 - DNA, 657 bp, Homo sapiens
  misc_feature (1)...(657): n = A,T,C or G
gagctttgagattcttctncggggatcggccataaaaagacagaataaaacgcacgggtgttgggtccgtttgttcggatcctcgaggcgcgccatttaaatggcgcgccggccagcgaggccggnacccaattcgccctatagggaaaatgtgaactgatagttaaccaagccacagagagctctgtggggagagaccaggtgacctcatgatgtccctcagtgctgcaggtctggagaaactgaccacagctcataggtcaggtgaccaacggaggcactgactaatcangattgtagtactgtgactgtggggatcattaagggtctaggggtgacccgcaagcctggagcttaggggcctagacatttgccactttgatacaaaggggtggtcagcattctgtctgtcctattnttttccaagcccccctggtttccccgtccttgccgccttncttttttaggggccttctcttaccataagccttgganctggccttgaactttttttttgccagaacccggggcttgaccttgggaagctnacaggcnagntcntatcttaccntgngctgtgtttctgaangggtttggggttngcaannnttacccccangcttccttggccccccnttttccattaaaacaaacccc

SEQ ID NO: 2523 - DNA, 141 bp, Homo sapiens
  misc_feature (1)...(141): n = A,T,C or G
ggtcctcctctatggcctgtccatgagctcctgccttgacttccctncatgatngactataaactgtcagctttgagtctcgatnaagaacacagatnaagatggaacaattaccttttcggnacccgggcaccacttgtg

SEQ ID NO: 2524 - DNA, 544 bp, Homo sapiens
  misc_feature (1)...(544): n = A,T,C or G
aactgagttgaagcctgagacaagacaatcccagagagatgaagtgnatgaccnaataacacctgctctgtgaggaaatccactgcacctgagaaacgttgttgccagtgttgctgcttgtgatacanatggaaaggagcccgggaatccattggacaggctcttctccctggagcagcaagcttctatcttacaaagtgctgaatacagcttctgataaagaactggaagctttcaggttgcttcgaggaaggaaagtcccgtcaatattgtanaacacaagaaagaaatttgggccgtttcanangttggagaatttgatagacgtgccctttgatccaatataaaactgctgttgaagttgtaactccattctctgtccngagaacagacggaggaaaaaagtcncagggagaaagtggctgcttganaaangttcattcaaancccnggggttganccaagaaaanactttaangggcagcttaaanaanattcgcatctttttggntttttggnacttccgaaaaaattgcattgggct

SEQ ID NO: 2525 - DNA, 265 bp, Homo sapiens
  misc_feature (1)...(265): n = A,T,C or G
agactgatgaatgctgaccagtgagatgccagcctgcgtgtgaagatcctacagcagaagtgcatggccagtgacacaagaacttgcgtgagatgccaggacttggnaggtgggncttgatccctnaagactctgcactnacaccncacgacntaatnnntnatnactntgnccntccancccaagcatntacnanttnantgcttttnttagtactgggatgtttganatggggtctatntacttgtntcttgctgtccctatc

SEQ ID NO: 2526 - DNA, 132 bp, Homo sapiens
  misc_feature (1)...(132): n = A,T,C or G
tgaggaactctcaaaggntcggacaaggnaagcatggcntggttccatatatctactgcctcnaatngatgaattcgagctcggtacccggggatcgaagntnctattgggaagtncctattctctagaaag

SEQ ID NO: 2527 - DNA, 514 bp, Homo sapiens
  misc_feature (1)...(514): n = A,T,C or G
gcctcctgctgctcctatntgtgggattgatcatnacctatgngatgctgannanccaaaagataaccnnganggcttagagaaggtncagcaaggatgaggctgtangggccttctccatatctcctccanaanaggnaccaagggtcacagnttacaagatggtnaagctggctgcactgnagccctctttgggacatggggctgtattcttntcattttgacaacctggatccctntctntnttggtcatccttttagaagccaanagaaaggtgggttgtgaagcctntnactttccttatgctcagangctnaacattgctngttggtcctgtccatctcacagctaaagctccctgtcncttccaccgagactctnctcttacctntntcttctaccacttgtctaanngattgacatgccttcacctctntgtccagaactgtacngttacatggcagctcttccctananacactttccatcttnatgaagacttctggacccagg

SEQ ID NO: 2528 - DNA, 101 bp, Homo sapiens
gaccactagacaggagatgctgccaagtgccccagacgggatcaagactccaatgacaaccataagattccctaaagctaagacactgcaaagaaaaaaaa

SEQ ID NO: 2529 - DNA, 306 bp, Homo sapiens
agactggcctcttgacttggatttcccagtcttcacaagcacaagacaaacacatttctgttcattataaatcactctgctccagacatgtggttacactggaacaagatggaccaagacaggcaacgtccttacaagaacctcaacgtgaagacccatgctttgctttgctttgtcttccaagatgatgcttactcagtggccaatactcaacacaggtagaaaccaataaatcagtgaattagcacatttgtggtaaacaaatgtatcaataaaattaaatgtatctgtagatgaaaaaaaaaa

SEQ ID NO: 2530 - DNA, 359 bp, Homo sapiens
  misc_feature (1)...(359): n = A,T,C or G
ggtcttggtggataccagttctgtttcgagtaacactgctaaccctgagaatgagtcagaagagcagtcttcacccccgaggagaaggaaaagacagtgcgcccctctcaatctgacagagccgagccttaaaaggcaggtgngnnnatgnnnttaatgngcttnngaggacnnttntgcctggnttagnactngaacactnccgaanntcanggncgcngatgantctgntngacagtgggancctggtcnatattangncacgatganccctttttctgcgnctttctctantattaaannaantcagctttcgtttaatttctatcttactactgtcattttaaaacctttaattg

SEQ ID NO: 2531 - DNA, 381 bp, Homo sapiens
  misc_feature (1)...(381): n = A,T,C or G
gactgagatttaggaccgataagcctcaattggtttgaggagctttcctcagaagcccccccatacaattctgaacctccggaggaatctgagtataagccccacggttatgaaccacagctgtttaaaacaccacagaggaatcccccctaccatcagtttgcttcaactccaataatgttcaaagaacgaagtcaaactctaccactggaccagtcgcctttcagagaattagggaannaggtnggngggggggnacatgcctttaatnntagnactaaaaaggcagaggnncggtggggctctctgagttatgaggncctntngctttanttatcanggacgaggactgccaagagctgcatactggagagatgcttt

SEQ ID NO: 2532 - DNA, 274 bp, Homo sapiens
  misc_feature (1)...(274): n = A,T,C or G
gactgaggggaggcctcaaaaatgagaagattctattnttggatctgccagcactggggctgtctctgcagccctggctcggaatacccacacctagaatttccaagagctggcaggataatgggcgcccaaagctgttcacatctcaagtctccggaacccaggaccttaggtggtagactgcaggatcaatatgagtatcagaggcagcagcaggatgcgatgctctgtgtgagcccccatgacatcgtgagatgccaggacttggaaggtg

SEQ ID NO: 2533 - DNA, 416 bp, Homo sapiens
  misc_feature (1)...(416): n = A,T,C or G
actgagatttgaggaggggaaaatatgatggtgtgaagatcctcttagccatcacaaagatatggcaggcgtgtgaaggacaattgtgtgcattcattagctgcttccgccaagcaagaattgtcatcaaaaggaagaaattaccagcgctgctacatttaaactcagcctgggccagcagccatgagcagtggccacagtgaaccttggaggccactaggcaggnnggaaagnttggagctacattccngcnagnctttggatcctgnnttgggtatncccataatntgnnttggcagatagaagcaaagctcaacatccccaggatgcctgcatatctggttggaaactcaactccactccatttacttggtgtactcttcaggggtcgtgagatgccatgacttggaaaggtg

SEQ ID NO: 2534 - DNA, 127 bp, Homo sapiens
  misc_feature (1)...(127): n = A,T,C or G
actgagctgggatgaaagcagctccattagcagtgggctcagcgatgcctccgtnagannccnntantaggagggngatgccagctnctnacccgacgtgagatgccaggacttggaaggtgaaaaa

SEQ ID NO: 2535 - DNA, 434 bp, Homo sapiens
  misc_feature (1)...(434): n = A,T,C or G
agactgagaccccctgtgatgcttcctgactgatcatgttataagtgtgcccggaatccaaaggcagcatatnctgtggaagaattgtcttcatcatggagagtcaacaggatgaagctgttcaaaccaaaggagcatcaacttctagcgatgcccaagaccagggagctgaaaagggagccaagaataagacaactgaggcaacagaaggaccaacatcagagcctcccttatcaggcccaggtaggctgaagaaaactgccatgaaactctttggtggcaagaagggaatctgtactctgcctagtttctttgggggtggccaaacaaaggttctgggaaagtcagctcttagaaaaagtctaaacaagagtnagactcacgatngtctaagtgaaaccgtcttcanggaccttnaaaattttgtcatttga

SEQ ID NO: 2536 - DNA, 444 bp, Homo sapiens
  misc_feature (1)...(444): n = A,T,C or G
agactgagaaagaactctgcaacatgatacttgattgctgtgcccaacaaaggacctatgaaaaattttttggcttgntagctgggcggntttgtatgctgaaaaanggatacntgggatcntttggaanganattcaagggaccaggaccaacccnttccttcgttanagaacaaccaaatggagaaaggtgcttaaaatggttggcttcccctttattccccagaattcacttcccgtgggaggtggntcttcgaatggtatnaaaactggagtggaaagaagacccccgaacattcgtntaaatccgaaatttttttgtcnaagaatctttctttccaggaacctggngtggaaataccattggggtcnttccctaaaacctggaatgccganggttgnaagggatgaaaacttcttccagccctttcgtgaggatgccca

SEQ ID NO: 2537 - DNA, 264 bp, Homo sapiens
  misc_feature (1)...(264): n = A,T,C or G
ttcttgtggaactctcnnaggtcangacaggatctgtgtacncaanngatacgaacgggacggcacggacgggantccacaaggtangaagcctgcgccgnnagatgccacgacttnaaanncgggaccagtccgacagtcanggccgncgcccgcnncgacgtaanccacncgcgcagaaacggacgccgcggtcaagatgnctntgtcatgccnaacgggacgcacggacgcacggacggacttcaaaaggtaggaagcctg

SEQ ID NO: 2538 - DNA, 106 bp, Homo sapiens
  misc_feature (1)...(106): n = A,T,C or G
ctccatcactatacgggagatgctgncangngccccagacngtatcaanactccaatgacaaccatangattccctaaagctaaagacactgcttaaaaaataaaa

SEQ ID NO: 2539 - DNA, 205 bp, Homo sapiens
aactgagcccggactttcgcgacgccttccgtcgtcttctgtgtatgctacggtggccgtggaccggaggagccacgcgcagtcaccttcccagccagccctgttgaagccaggcagagtccaccgctcaacaggtttgatggctatgaaggtgcgcgtccgtttcccacgtgaagggccgtgagatgccaggacttggaggtgg

SEQ ID NO: 2540 - DNA, 188 bp, Homo sapiens
  misc_feature (1)...(188): n = A,T,C or G
ttaacacactgagggtctgacatggctcaccngacnnctagtgcagnngttgctcctgggganctggatggtcnnactgngctcaaatccagacctactcggnccacggactgaacttntcaatgtctgcgtganatgccagggactnggaaggtgggacaacgtgagatgccaggacttggaaggtg

SEQ ID NO: 2541 - DNA, 242 bp, Homo sapiens
actgaggtggggtctttcagagtcttcctgtccaagaccagtgactgcctgcttccaatctgtggtccccgggacagctgagcttgctccggcagcagagagactctggagggcttgtcgggaagtccggcccgctcggctatgattgacggcagcggcttccaatcgagaagcttctccacttcctgtttccaggagcagggaaaagcgccagaagtcggagatgccaggacttggaggtg

SEQ ID NO: 2542 - DNA, 312 bp, Homo sapiens
  misc_feature (1)...(312): n = A,T,C or G
cctaccctgactgaggtatccccaggcatcatctattgacggagcgngacgatcnacacgcttaactntgaaccaggatacattnatgctaggctaccacatgtcggngggaagggcnatngaggacnccatgtnacantcctcgaganggcggctcccaggacgccgggngangncnngncntcannnacaccantagcagcantggcagtggccanaaggcngnaggaacagacaaaagtaccgcggtggccgccaccacggcgccgacctacgtggcanacgatgccccaccccctgagcgtcgtgaga

SEQ ID NO: 2543 - DNA, 408 bp, Homo sapiens
  misc_feature (1)...(408): n = A,T,C or G
agtccggcaacagctanctgaganacctgnataaaagggtctaattactacanatgaaagaggaagatgacggacnatgatgactttaatgnnancnacnaggaggattgatnnctcancccgnacacccctctcccnttcgaatcagnttnnggaannncnccnntagagganagaaacttaaaggggggctttctgttctttttggcctactcccaanaagatacccgcgagttctggagttagatgtgcagctccaagtgaggaggagtgtgcgcagtttgagcctagctgcggatgtgttgtgaagccagcgtgctaatgcagagcctctatctaccttttaggattttatgggtnctctcttttctctcttttttttccttttctttcttttttgaatttgaa

SEQ ID NO: 2544 - DNA, 295 bp, Homo sapiens
  misc_feature (1)...(295): n = A,T,C or G
tgaggtggggtctttcaccncgaccgtgtctggaccaggtcttcgagattcccatgtcttcattggtggctanatgaactacatgcagtttatgcgctttgncagtgatggnactactcanaggatccaggcgcgagggccctgggtgaancngatggggcctgtgtatttgnagatggaaagaaggaaaacggtnagctattcncacagngcccgataaaacctgcgattcgcaatccaggtctacanccagagcgacnaggtttgnaacatggggccagaccgaccgcctcct

SEQ ID NO: 2545 - DNA, 282 bp, Homo sapiens
  misc_feature (1)...(282): n = A,T,C or G
tgggggcacaaatgcacattggtgggaaaggaacccggttgtngaaagaattatggttcatgggaacactcacagcanaccgataaaaaactgccnttctccttaaagaaattaggggtaaacnacatntccggngtttgaanaggngaacaccgtttacaaaaccaaggaacaagtgatcnatgttaacaccaccatcaaggctttttttggnangcaaactntttttccaaggccacgttttggagtccaaaaggcaagccncncaagacctttctgttg

SEQ ID NO: 2546 - DNA, 304 bp, Homo sapiens
  misc_feature (1)...(304): n = A,T,C or G
ggacggagcaccgtgacaccggggcagatcctacagacagnctgtganntcccnaggtntggacttttgatcataagcacatnnngaggnataantgccntnctgtggaacangccncaaanccaatcatgntgngactggttgttnccnagacagtggaaccactactgnacccaacctgcacatcctgnctgctcagnaggtcantttcatagcctgctanggtctacccgtagagatgccannacttggaaggtggcttcaacaaacttctangacagttcactttgattggaatttcccc

SEQ ID NO: 2547 - DNA, 456 bp, Homo sapiens
  misc_feature (1)...(456): n = A,T,C or G
ctgaggcctccccagcccagctgccctgccttcatcactgtcaagctgagccctttgcgagatcgactcgtggtgactgagtgccagctgacccactcacacccagcctgcccacgtgagntcncctaccacttncgcccaggccacttgctggccaattcctgcctgccagtccgcatcaccaaccagatctccaaacagtttgtggcccctgctgatgtgcgccgcctgctgacccattgcaagggcccagaccatggggtcctagatgccctgcaagtgcttgaggggctcttccgcacagatccggaggccaagtaccgggacttgctgttgccattttaaagatgaaatggagatgagggcagcnnccaaaagccccttanccngaaagaagactgagaggaatgaacagtcagttcctacaagaagaaaccggcaggaatggaggttgtt

SEQ ID NO: 2548 - DNA, 126 bp, Homo sapiens
  misc_feature (1)...(126): n = A,T,C or G
ggttccgttgacacactgagaacttcctggngaaactagtgagccaagctgggacaggtttctccttcaaccacaagagaagccgactccgagagaagctgagccttctgcactatgatccaatag

SEQ ID NO: 2549 - DNA, 189 bp, Homo sapiens
  misc_feature (1)...(189): n = A,T,C or G
ggcaaacatagtcgccattatgattagctacccaaaaggacgggaaatttttgatctggtgcaaaaaggaattccagtaaaaatgcggatagagattggtactctgtcatatgcaggagttcatcancggtcagtntgnggtgcttgagnccccccgcctttatcaccattgatgaccattttctttac

SEQ ID NO: 2550 - DNA, 312 bp, Homo sapiens
  misc_feature (1)...(312): n = A,T,C or G
cactgagtgtgtaaagtgaacaatggccagtaatcacaaatcttcagcccctcgccctatttctcggggtggaataggactaacaggaaggcctccttctggaataagacctccatctggcaatgttcgagtggcaactgcaatgccaccaacaacagcaagaccaggttctcgtggnggtcccttagggactggtggagttttgtcatctcaaatcaaagttgctgatcgtcctgtgacccaacaaggtttgagtggaatgaagactggcatgaaaggtccccagaggcccgtgagatgccaggacttgga

SEQ ID NO: 2551 - DNA, 428 bp, Homo sapiens
  misc_feature (1)...(428): n = A,T,C or G
caactgagatatgcttttgtgnttanggaatttganggggantgcnctgnatcacttttggtnatatcatcactggnctggtttgacccactggctgncangatnctggtacctgntgnnnggccctggagctatttgggngactacaccctatcctgcacataatcacctgccgctggttccagactcnaagttncaagatgccttccnggctaaaacccggacatgtgagccactgncaggccccaacaattacncagaaccatngtggnacctgngaaaggcatnnganatttntaanaagcactggtggatnggngctccatggaagaagaaaagaattaaagaaaacccgtactggagaaaatnctgnaacccttgcaanagaggccccggagctttttccagagactatgccctatcctgca

SEQ ID NO: 2552 - DNA, 136 bp, Homo sapiens
  misc_feature (1)...(136): n = A,T,C or G
cagaggtgcgagggggacccattttatgaagttctgggtaangtgtcncctnggaagacgtgactgacagaaaacatcaaatctgaaattcttggatgagacagaccngtncaccgataacagaacaaaaaagaaa

SEQ ID NO: 2553 - DNA, 213 bp, Homo sapiens
  misc_feature (1)...(213): n = A,T,C or G
cctgctgccaaggctaatagtgatacccagactccaagtcacttcaaagtcacccaccccagactcagggatcatgntgaagaagaagtcctccaaaaagaagggcttcaaatttntgcaggagaagatgtttgaagtttcagcatgtcatcaggaatcagttnttgcagcagataagccagcagatgcagtgcgtcccgccgtgagatgcca

SEQ ID NO: 2554 - DNA, 424 bp, Homo sapiens
  misc_feature (1)...(424): n = A,T,C or G
gaggtgcccagatcattgatttgatgatgctcgtgattgatgtgaccaagggaatgcagacacagtccgcagagtgccttgtgattggccagatcgcctgccagaagctggttgtggtgctgaacaaaatagacctgttagcagaagggaagagacaggcagcgattgacaaaatgaccaagaaaatgcagaagactcttgagaacaccaaattccggggtgcaccgattattcccgtggcagccaaacctgggggaccagaagcccctgaaactgaagctccacagggcatctcagaactcattgagctcctgaagtcccagatttccatcccaacgagagacccctctggaccattccttatgtctgtggaccactgnttctccatnaaggggtcaaggnccccggggtgaatgggactttc

SEQ ID NO: 2555 - DNA, 180 bp, Homo sapiens
  misc_feature (1)...(180): n = A,T,C or G
tgcgtcaggcctagcatactgaagggcacaccctgcaccttacgccannatnccngntntantnncctgtaccgagttggagtcatcaaaacctattctgaagngagggagtngagacgttctcctaggttaagggctggctccatggcctcctcaggggattntgttcccaagtggtcc

SEQ ID NO: 2556 - DNA, 125 bp, Homo sapiens
  misc_feature (1)...(125): n = A,T,C or G
cccacggttcgggggggnnaanagggaagaggggagcgaaagncaaacattctcaaactccggngantnncaaaccacagagctgcctgcagaaaatgnagagacggaaaaccatagtccaccct

SEQ ID NO: 2557 - DNA, 118 bp, Homo sapiens
  misc_feature (1)...(118): n = A,T,C or G
actgggtgatgaagcttcagactgagncnggagatgctgccaagtgcnccagacgggatcaagactccaatgacaaccataagattccctaaagctaagacactgcataaaaaaaaaa

SEQ ID NO: 2558 - DNA, 105 bp, Homo sapiens
  misc_feature (1)...(105): n = A,T,C or G
tttgttgaagacgcttngataccggacgggccagcnnacaagcgcnngnggcgggatcaagacancaangacaaccataagatnccctaaagctaacacactgca

SEQ ID NO: 2559 - DNA, 408 bp, Homo sapiens
agactgaggtgtcccccactaatagatgttactttacacatgctcaatgggtacctccttgcctctaaagcttaccttagtgcccatctaaaggaaacggcagagcaagatagaccttccccgaataatacagtaggcttggttggacagactgatgccccagaagtgaccagagaagaactgaaaaacgcattactggctgctcaggacagtgctgctgtccagattctcttagaaatttgcttgcctactgaagaggaaaaggcaaaaggtgccaattcagacatctccctcaggaatactcaaggtgtcaccaccatcagcactccaagtaaagaaacagaagaaggagaagacaatttgctctgtaaccttcgggaagttcaagtgccttatctgttgcctggt

SEQ ID NO: 2560 - DNA, 207 bp, Homo sapiens
  misc_feature (1)...(207): n = A,T,C or G
agaggactacataccggtgaagcggncccggcgggaggacactcncntgntgccatcacccnatcagctncacatnaacataaccgcatctgggaagagggagcctgccccnntcctntcatacaatatngngacactgactaatagtgacnactnaactntgcgtgggatagcgctctgnctttngtttntattgaagattcaaaa

SEQ ID NO: 2561 - DNA, 123 bp, Homo sapiens
  misc_feature (1)...(123): n = A,T,C or G
agactgaggtgatgaagtctcgatcactagacgggagatgctgccaagtgccccagacgggatcaagactccaatggcaaccataagattcccttaaggttangaancttgcaaaaaaaaaaa

SEQ ID NO: 2562 - DNA, 413 bp, Homo sapiens
  misc_feature (1)...(413): n = A,T,C or G
aaaggctgaagcataaggatctnaagttccanccnnattccttanggagcatttgcctccatanaataagtntaccntnaccgtgagatgccnngactnnggagnngntgntggaatgcngctttnngnactgnatctctgcnattgctgatatngnctgaacggnntnannncaagatgccatggaatcacggaattngctntgatacacctctcccacaaaggtgcacatccatgaaatctctccattataagctgcctanctgtgacctggctcatgacnccagtcgccatgttaacacggatgagggaaagccagggaggctncacccccacctgcagccaactaagaaatgctgggattgggaaaaattgtcttcccctaggaagaacactgcaagttgttatcccat

SEQ ID NO: 2563 - DNA, 307 bp, Homo sapiens
  misc_feature (1)...(307): n = A,T,C or G
agggtgttttggaggagtagttgtggttatnaagggatcccacatgctnaagaatgccctcaaagggagtgagaaatctgggatgccnngggttccgagatttctggacagcttgggattntctgccgacaggaangggggacctnggcccagttatggttccnantggaggcttttgnagctgagtacaaagatatggattcaggctttangnctancaagttngntcagtgtaaggcctttcccttttttttactctgtngnnncannggggaagaaaanancttattttatgactggcattttt

SEQ ID NO: 2564 - DNA, 185 bp, Homo sapiens
  misc_feature (1)...(185): n = A,T,C or G
taaccagctataccagacagaagcgaagcaagagtccttctgaggactgtgatctagagaagagagagccagcgctcagggtccttgngaagaagaacccacgccattcacannggggcgaattngaacntttcntaagnntncaggnggtaaagcgcntctggaattntggggtcccggaacct

SEQ ID NO: 2565 - DNA, 102 bp, Homo sapiens
gtgaggtttgaagacgagcaacggatcaaagaagggagagaaatgaagaaaatcagacggcactccacttacaggatctataagccgtgtttcctgaaaaga

SEQ ID NO: 2566 - DNA, 224 bp, Homo sapiens
  misc_feature (1)...(224): n = A,T,C or G
ctgaaacctgtttgctcangttnnacgtatcagagagcttggagcggagcttgncgccccancgacctgccactcccactgcctgccttctagctgttccanagccatnacagtggacacctgcatctttactccaagatgatttggcgggaatcgggtcccttcccctgcttcataactgaatgtcgnaatantaaaattgaaccttgagcagaaaaaaaaaa

SEQ ID NO: 2567 - DNA, 163 bp, Homo sapiens
  misc_feature (1)...(163): n = A,T,C or G
gaaattcgattccgagtctttggaggtcctgaanggactaagacttcttcggaaacaagaagtccgtctcagatgaatgtggagcattgcaaatacaccaggagcccccaaatgaggagaaaacacaaggggtcctgttggaaaggagtaaggagcccaagaa

SEQ ID NO: 2568 - DNA, 270 bp, Homo sapiens
  misc_feature (1)...(270): n = A,T,C or G
ctgagatggtccaagcctgacattccatgatctgggatcccgacctatgtgtccaggctgctgcttgatagcggatgatctaaaccaccaggcagtcctgggccaggagaggcggactctctgcctggatgtgtggganctnantncnaanttgatngnccnatctggggggnatncacccccaccccanaaagaaagcanaatntgttttgtggntggggnntnaggcgccaccccctnaancatggccacccctgtggtcaccaagac

SEQ ID NO: 2569 - DNA, 103 bp, Homo sapiens
  misc_feature (1)...(103): n = A,T,C or G
tctcgctcctagacgggagatgctgncaagtgccccagacgggatcaagactccaatgacaaccataagattccctaaagctaagacactgcaaaaaaaaaaa

SEQ ID NO: 2570 - DNA, 103 bp, Homo sapiens
  misc_feature (1)...(103): n = A,T,C or G
ctcgtccttgactggagangctggctagtgncccagacggggttaagactccaatgacaaccataagantccctaaagctaanacactgcgagaaaaaaaaaa

SEQ ID NO: 2571 - DNA, 134 bp, Homo sapiens
  misc_feature (1)...(134): n = A,T,C or G
agaacgaggggatcaaacagtgctcattcttcatngcanggngttgcacngaaggtttncggaattgaannacgattattttgccctcctccttgtgngtttcttatgggccgnggggtggggaaaaaaaaaaa

SEQ ID NO: 2572 - DNA, 233 bp, Homo sapiens
  misc_feature (1)...(233): n = A,T,C or G
gggtctggttagtctcagctgactgacctaggnaatgggctaggaacggaacagccaagcaccggggcatngtcttgctngtcctcacgggcaagccctgttgcatctgggcagnggctctagcntctctccaaaacatggactgcttgcccaccccaagtngctggnggggaattgtctataagcccaacgttttctgtnanaagccangtngggccatcctgggttttggt

SEQ ID NO: 2573 - DNA, 510 bp, Homo sapiens; identical to SEQ ID NO: 19
  misc_feature (1)...(510): n = A,T,C or G

SEQ ID NO: 2574 - DNA, 131 bp, Homo sapiens
  misc_feature (1)...(131): n = A,T,C or G
tgatgcgattgactaaacctactttgttcaccaatattcctgtaaccgtgagatnccaggacttggaaggtgggcccctttctcannaacntctanntttnnnntttttnnttatattcccccccttactt

SEQ ID NO: 2575 - DNA, 103 bp, Homo sapiens
  misc_feature (1)...(103): n = A,T,C or G
agatgaaggatgaaaaagaaaagngctccatccacacgtgctgtcctcaggcctagccacctncttctacaagcatcatgcagattgctctctgtgggcatcg

SEQ ID NO: 2576 - DNA, 117 bp, Homo sapiens
  misc_feature (1)...(117): n = A,T,C or G
aggctcttcccaaactccactgcaccctacctgctgntccaaactggaagctgnttatgnctttactcangtgganttaaggggaatgctttactatgncatgctgactgtccaaca

SEQ ID NO: 2577 - DNA, 138 bp, Homo sapiens
  misc_feature (1)...(138): n = A,T,C or G
gaacatgccgccccactgaagacctcatcagtgtggcatctatgaggcgtgcttttttttcctggcgcactgacttgccagctgtccagagcctgngctgcctgcagcacctgtggtccctacagaaagggagccacc

SEQ ID NO: 2578 - DNA, 414 bp, Homo sapiens
  misc_feature (1)...(414): n = A,T,C or G
actgagtcctgtcttctgaacgtcgttctnaaagattnggaacacctctgtctgccagcanagttgtgcctgagggcagggctgcaggggaccttctgagacagaagatgccactgaagaagccggaccctcagagcagcaagagtgagcatgttgatcggacgttttcagatggtcttgaaagcaggtgccncnttgangacaccnnctgtcctggngagcttgantcaagngacatanagcatgatgtaaataaaataaatgtatagatggattgtntgtctgttnaaacaaattacntgttcctgtnggtgatgctaataccaatcanaaagaagcaatctcagccgtggaaggagcgagcctgcagtcaccttccaggatttgctgatgaacaaccctgagacaaatcct

SEQ ID NO: 2579 - DNA, 255 bp, Homo sapiens
  misc_feature (1)...(255): n = A,T,C or G
catgcacatttgctaccangagaaccactacatgcactcacgcnccttgncctatcacaggntnggncctacacggagtccctggataactttctangaattnncacacttctgnaaaagcancttcccccacatctcnntctcttggcctaaaacttaacaangttttccctaaacacttcttggagcttgcangacanaaaagggngtgtganaggnaaagacctgtcttgtgtggacctaataccctgacct

SEQ ID NO: 2580 - DNA, 111 bp, Homo sapiens
  misc_feature (1)...(111): n = A,T,C or G
acactgagagggagaagaggcatcaggagngacggagggcaccagctcaccccacaccctttttttgtcattgttgcttntttttctaataaaggtggaaaatagaaaaaa

SEQ ID NO: 2581 - DNA, 106 bp, Homo sapiens
gagactgggtatctcatcattcaagctgaccccaaactcgctcactatatatggagaccatgacctgatcctccagcccccagtcccggagtgcggagattacagg

SEQ ID NO: 2582 - DNA, 172 bp, Homo sapiens
gactgggtcccagagtagcaagaagcatactggtgatcatagtgaaagccatgtattgaatccccggccacttgtcgtaagtgcttctgtttctcccgaggaaagccagtaatggtcatcaagacccagaaagcagacctgggcccacaactcccagagaagaagaaaaaaa

SEQ ID NO: 2583 - DNA, 103 bp, Homo sapiens
  misc_feature (1)...(103): n = A,T,C or G
ccattaactttctattgngaaagctttgnggggaaaaaacattcgtttgactnaatatnagagctaaataaanccttggatagcacaaaccagaaaaaaaaaa

SEQ ID NO: 2584 - DNA, 143 bp, Homo sapiens
  misc_feature (1)...(143): n = A,T,C or G
actgttttggagttgncantaccatgaaatgaccaccnngancagnaccagcagtngantnctggcagatggagcctaaaagacgaggccaangcatctcaaggaggtgaacttgtacaaaacgaangctccaaaaaaaaaaa

SEQ ID NO: 2585 - DNA, 212 bp, Homo sapiens
  misc_feature (1)...(212): n = A,T,C or G
tacttcttgtggaactctcattaggtgangaacanactcatganagccgtccgtccctttccacgggacagtaacccagctggcagccccgcatgtccccgaggcctcagaactgctctctgaaaatagacatggtgtgggggctccccacanaaaggaatgctgtactgactggatagaaggagaataaaaatatacttgaaaaaaaaaaa

SEQ ID NO: 2586 - DNA, 418 bp, Homo sapiens
  misc_feature (1)...(418): n = A,T,C or G
cagaactgagacttggtcttttgagacctcgcatcgaagatggctcaggcaccaacagttatcgngactcaacctggattcgttcgtgctccccaaaattccaactggcagaccagcctgtgtgattgcttcagtgactgcggagtctgcctctgtgggaccttttgtttcacttgtcttggatgtcaagtggcagctgacatgaatgagtgttgtctgtgtggaacaacggtggccatgaggactctctaccgaacccgatacggcattcctggatctatttgtgatgactacatggncacactcttctgtcctgtttgctctgtgtgccaactcaagagagacattaacaggaggagagccatgaacgctttctaaggagctggatggcaagaactctggctgaaaaaactcaact

SEQ ID NO: 2587 - DNA, 218 bp, Homo sapiens
ctgagaactccaagatgggaggcaagctgagcaagaagaagaaggagaggagtactaacgtccattccttgagccccctgtgtcgtcaaactgctccagtattagttgcaggcactgatgcttctgtgctgtttccattctgtgatcatgtcttctccatgttgtacctcttaagttttccatgatgtctcaaagtaaaagctttaagaaaagaaaaa

SEQ ID NO: 2588 - DNA, 106 bp, Homo sapiens
  misc_feature (1)...(106): n = A,T,C or G
gtttcgatcactagangnanaatgctgccaagtgccccagacgggatcaagactccaatgacaaccataagatcccctaaagctaaggcactgcagaaaaaaaaaa

SEQ ID NO: 2589 - DNA, 107 bp, Homo sapiens
  misc_feature (1)...(107): n = A,T,C or G
gataggaccgaaaaggaccaantngaggcatactgaatgcttttctggagcggcngggatccacnggcggctgatccccgcgaggcttgtgggatcccctcgctgag

SEQ ID NO: 2590 - DNA, 111 bp, Homo sapiens
  misc_feature (1)...(111): n = A,T,C or G
taccacgcccacgtgctgnaacctgaggagccacanangngcacctttatactgnaccagagataataanngcagggaagggggggcccctcccccttcacttcatagcta

SEQ ID NO: 2591 - DNA, 171 bp, Homo sapiens
  misc_feature (1)...(171): n = A,T,C or G
tgagcagagacagcaagatggctcatgctggcanaggcacctgcccccaactctgacacctgaggtcattccacaggactcacagcgtgaaggagagagacaactccagnaagctgtcctctgacctacagnacgtacaccttcctntcaataaacacatacccccccccc

SEQ ID NO: 2592 - DNA, 104 bp, Homo sapiens
  misc_feature (1)...(104): n = A,T,C or G
ctgatagctggagcaanancatggcgagtatnggtgacaggacngganctcctatcantaaaaggctgnaaatactgggatngggggacccaacccacggatgg

SEQ ID NO: 2593 - DNA, 122 bp, Homo sapiens
  misc_feature (1)...(122): n = A,T,C or G
acccagtaccctagtaggctttccaccaatgggaggaggtngcttacccaccancaccaatcggtgggtatncangaagctggaggctaccccncacctaggatagtttttccaacccctgg

SEQ ID NO: 2594 - DNA, 224 bp, Homo sapiens
  misc_feature (1)...(224): n = A,T,C or G
catatatggcctgttttattttacccgtgtacgcnggaccacaacctcacaggcattgaagaccangtacttttngtnacccgccccgggccaacacctggatgccagcttccgcnaccaaactgtcggtggaggnattttaggaaccggccgnattcnncccgnggnacnaagnggnaannnccnaagnctttnnaaccaaggnattttggcccaaaaactta

SEQ ID NO: 2595 - DNA, 213 bp, Homo sapiens
  misc_feature (1)...(213): n = A,T,C or G
gcttctatgaggatgaacatctagactgtgganggttgcaaaactngaancttgnntctcaatcncnatnttgcaacangactgaaacatgtgtgacttgttcacttgttggcanctgaccagatacccccaggnagcctgctncctacaattcccaatgaatttacaacttntctaccccatagacgtggggactgtgatctcttgaacttt

SEQ ID NO: 2596 - DNA, 230 bp, Homo sapiens
  misc_feature (1)...(230): n = A,T,C or G
tgagttcaattcccccacncacatgagaaaanagaacttntnccgctanngctttgnnaaaacctttactggctgcttggaaaatgaagatgcngactccanattggcgatttatatattcttcatgcaagggcagcatactaaaagagagaaggagctgcgctgaccagtgactgaaagctgtaagcactggaacatatttgcagaagacaggatttctaaggtgagat

SEQ ID NO: 2597 - DNA, 239 bp, Homo sapiens
  misc_feature (1)...(239): n = A,T,C or G
ccatctctaccaaactgaacttgctggtgtatctgagaggtntctgagagngnatggagctgccgctgcctgctaacttgtgaaatgaactgctgatttccagacaacacagacagaagttcctccaaagaacctttgtaaataggtccacttcccctgtatcctttcttttatactaccgctggtgggtagtgggttacaaggaaggttaaagtgtttaanacccatcattaaaaata

SEQ ID NO: 2598 - DNA, 361 bp, Homo sapiens
  misc_feature (1)...(361): n = A,T,C or G
aacactggaacagacctgaagctnaacgcgatggcccacacttgncattctnntcagatgtanttgggaaaccaaccaggacntgagccttanangcaacgtcnggntncacagcaccttctaatacaggctgagctaaagganaccttgnttaacaaattggacngatagcccaaggaaggcncgtatnaagcgacngcangcgctcgctcggctcacaaangcacaattgccccggaaaggaggangaagaagatcctcttgctgaagaaaaaccgactagaagaagaaaggttgttataaggaaganaggcncaagactccatgaaaaaatgggtacctgagggaagaaaaggccccc

SEQ ID NO: 2599 - DNA, 209 bp, Homo sapiens
  misc_feature (1)...(209): n = A,T,C or G
tgaggtccttcttaggatctctgtggaagagtgaagctangccggatccctcctgtggacctgcccgcggttganctggctgtccagagcaaccattattgccatgcccagaangattctggaagtcaccctgaccccgagaagcagagggcccnacgcaaactntatgtggcctctgccatctgcctggtgttcatgattggcgaaat

SEQ ID NO: 2600 - DNA, 212 bp, Homo sapiens
  misc_feature (1)...(212): n = A,T,C or G
cttctgtggtctagcatngangattggaatctatgcatacgcannaatgacttnttcttgtcacacccacagagcccgaaccgagaaagccgaaccgaaatcccncgaggaacctcccggnggccnaaaggagggggtgggggtggtngnacctacaantttnnatggtggacntacagaattgactgtcacattgtcctctgaccttcata

SEQ ID NO: 2601 - DNA, 347 bp, Homo sapiens
  misc_feature (1)...(347): n = A,T,C or G
gagtggtgtgcattttactgagtctctcaggagctggaacccagaaggcagagattaanaactgtgccaagtggtgccctatcaactcaaaatgtgtcagtaacagaagctgtgtctgcaagcccggcttcagctcggagaaggaattgatcactaaccctgcagagagctgtgaagacatcaacgagtgtttactacctggattttcctgtggagactttgccatgtgtaagaactcagaggggagttatacctgcgtctgtaacctgggatataagctcctttctggtgcagaatcttttgttaacgagagtgagaatacatgtcaaggtaagagcccccccctg

SEQ ID NO: 2602 - DNA, 438 bp, Homo sapiens
gagaccaagcccaaatcaaagggaaaatccaccctggagaaatttttgtgaatctgctcaagccctgaggggaagaacagaaaggaaagagaaaaagggcttacaacctaagccttgatcccagaacaaaggccagccggcatcctttcaggcctgcacctggccaggcagcggagcaccggggtctcttccccagacttctgcctttcatcaccatcatctgatcagcgtgtcagcctgcccacctgtccagagcctgtgcacaccacctttctgcctgactgaaggtgacttggcccaggtcctgtgaactgactaatactgctataaagcatgcattgctcttggttacctttaaaagaactctaggtggtctacagtgaaatcaagtgaggaacaaaaggcaggcccgggaaagcaatcaaggtggtcgtccct

SEQ ID NO: 2603 - DNA, 108 bp, Homo sapiens
  misc_feature (1)...(108): n = A,T,C or G
gactgagctgtttagtgaaaaaataagtggtgccnnaggnacnaagcttgntnaaagaatttntgnacangggaaagaataaaatgaatgaactctgaaaaaaaaaaa

SEQ ID NO: 2604 - DNA, 320 bp, Homo sapiens
  misc_feature (1)...(320): n = A,T,C or G
aaacaatgaatagctcttttntgaaggcccgaggacaacaggatgttctttcctcacctttggaacgggtgcccccagcatcccggnccggnaaggctncacttggnactcctaaaaccncngtcctngaagactttcctnancaatgacgatnaaaaggagcggatgcaanngganacngctccanggctcttttgacctgnagtctnatgtacagattcgattcatnntggcctcccctaacaggaatnttgatgcttcaactaccatatctaacgtttacaaacncaccagtattacaggaacattactctacctgt

SEQ ID NO: 2605 - DNA, 397 bp, Homo sapiens
  misc_feature (1)...(397): n = A,T,C or G
taaccctgagaacatgcnncactgnaaccttactatgcctgccgganaactaccaggatgacgcactntntctatcatgggtctctcttggctcccagctttcttacattgctcgnggatgganantgggaagantgggggctacnncnnggntnnnnnggannangncccaaacaatgtgncncatggacntattacctcactggcgngtgaaagcgttcccaccgnacgcctgtggcctggctcataagctgngtggancaggcctctcgganccatgantatagaacttgcaatgccaaagacgtcgtctctctgcgtgccngggaaanaantcacngggcccgcccctgcatcctgttatttcnaactagccatccaaactttttaacattca

SEQ ID NO: 2606 - DNA, 311 bp, Homo sapiens
  misc_feature (1)...(311): n = A,T,C or G
acgtggtccccagcgcgccaggcccgggcccangtcccaantggcgaggccagtgcggctggcaccgacgtcgatcaangtgaccnacgtgtggtccgagcgccagntcagagcaggatgnanncagctcttggggttcctgggcantgatcnacgagctgntgcctcttnccgccggatgactnacctttgccagtntnctatnnagnctgctttgntnagntccatgactcangactcanangtngtggcacagnatntganaaacactgagctnggngacanagctttgatagtggaagaacacctat

SEQ ID NO: 2607 - DNA, 295 bp, Homo sapiens
  misc_feature (1)...(295): n = A,T,C or G
tttggggggggatacgacaggggcccangcctgcgcctccaccgacaagggcccgaacatcancgccntgncctgnaccatcctcacggncatgggncgncatnggagcangagccannagacgaagtttnntgnntngcaacatctcacaggagataacagactctggggccncccaggctngcnatgggggangcttgcctancgctgacccaaaccctagacnnagtcctgaccattngccccatacanatgcaaaaagggacacncacaaatcnggccatggaggactcaa

SEQ ID NO: 2608 - DNA, 259 bp, Homo sapiens
  misc_feature (1)...(259): n = A,T,C or G
ttaacaggcttcgaacctggaaaggaaagcccgtctgagagaggaggcatgcttttngngnngccaaaaactncactttnaaagatattntgggngcaacccaggaantaaaaggcntgcnnactaatgaaacctggcttttacaaaagggatacaaatctggaggacntcacttttggccagaacattgtatttttggccacaagaatggtattccactttcccctattaaattgcntggtaggaaggggaaccaaaa

SEQ ID NO: 2609 - DNA, 385 bp, Homo sapiens
  misc_feature (1)...(385): n = A,T,C or G
aagaactgaggtggggtntttcatttggctccccgtcggggaatcnaaccccggtctcccgcgtgacangcggngatactcnccnctntaccaattatngnncacaccngtggcgcggtaganttncagttnaacatcagccgttacaggcancngcnactgatggaaaccagccatcgccatctgctgcacgcggaagaaggcacatggctgaatatatactgttattttgatggaaaaatatatcttgtgtctgacaagaanctnatnacntttttgtggnatnccagnnggtntntgaagtaggccatnctcattaccggctcaatgatctgacttcnagactattgggcatattgggagctancnttaaccttccttcgaa

SEQ ID NO: 2610 - DNA, 466 bp, Homo sapiens; identical to SEQ ID NO: 20
  misc_feature (1)...(466): n = A,T,C or G

SEQ ID NO: 2611 - DNA, 452 bp, Homo sapiens
  misc_feature (1)...(452): n = A,T,C or G
tgttgggaccattaaggcaacgctattgtcctgatctctgaattgggcctctccccccaagaaagaaaagaaggtcaaaagcgggccaccgggacgcaccgctcaagaaaaantcancgccgggatgtcctgaacctcaaagaatacctgaataccgcccaantttcttggcttcccccgtgttaactgccttaaanaatgttgcaattcctatttggccccccctccccactngaataaaattacttccacctttttggctttgttatttggccccatcccctccccggcttgaataaagttatctgttacttccctgttttcctttgntgccaattcctactggccccatccttcctgctgaaaaaggcacttccccttttgcttggttgtttttaaaaccttggggcctgggcttaattacattttggggggtcttgaatacaaacttc

SEQ ID NO: 2612 - DNA, 280 bp, Homo sapiens
  misc_feature (1)...(280): n = A,T,C or G
accgccttctgggactcctccaggatgctgtgnnctccgctctttcntctctnctgnggaaatggaatgggggaaccccaaactggctatgagatgattcagaaaggagggatttccttcagggttgccacacagcaattctgggacaaccggtgacctagaattcttaggaaaagttggggaagccagacttttgaccaagactctccacaccatccctattgcaccctaacaggccttgagtaataacacccatacattcaaatgtcaaaaaaaaaaa

SEQ ID NO: 2613 - DNA, 111 bp, Homo sapiens
  misc_feature (1)...(111): n = A,T,C or G
actgaggtgggtttgggctgaggtagaacnngggcggagtggggntgatnnttagncggggaacngtcatangtcctnacaggaagcntggctggttccaaaataaaaaaa

SEQ ID NO: 2614 - DNA, 408 bp, Homo sapiens
  misc_feature (1)...(408): n = A,T,C or G
tggactctcggaaaggaaaggcnacgangcatggnttggaaccatancacgtactgccatcgnntgctgnttanatnttgnttgacaacaagaggagactgtggacgtaacgttntccactttgggcnanagagncnttcacctttggaaggcgcctttgcactggntttnaagantattcantacccgggagangctgtcnccaccagganaggnancccnttgctcatngnngtacnaancaantacggttctctccncagngcatatccccgtcttatatccgacatgcaatntngcnaatggnaanaatatctgcaagactaggatgaagagactggacagcttcncctgcctgcacctgtgggcgaaaaaanctggggaattcttttttgttttgagcaaggg

SEQ ID NO: 2615 - DNA, 252 bp, Homo sapiens
cataagtgactaagattggctgacgctggaggatgtgtgggtcgtacacctgggattaacttttattagaggggtggaaaacgtgagttgcggtgtgggtgtggccgattagaagaccacgctggggagatgctgcccatctaccatcctgtgtatcctgaggaccaaactcgggcttggtggtaaaagcttttatccaccaaatcctccctcgtggacttcgagattgcctaattaggtctgcacctcccg

SEQ ID NO: 2616 - DNA, 151 bp, Homo sapiens
  misc_feature (1)...(151): n = A,T,C or G
gctgacaagacacacacatacaaacaggcttccgagaccctcccaggtcaaacttgntggaaaccctccctgctcaaattatgcctcttaggatanaggtncccagcattttgttttgggtagtagaaaatacaagtaaaatgtggccaga

SEQ ID NO: 2617 - DNA, 179 bp, Homo sapiens
  misc_feature (1)...(179): n = A,T,C or G
tcgcagactgagacaaggtctagantgagggagatggctctgtggttaaaaatgccgactgctcttccnaaagancnnagtgcaaatccgcanacnaaaggcatccggagacccatactgggcgnattctggtgagtgtagctgtgttggttagtgccctggaagggttaaaaaaaaaa

SEQ ID NO: 2618 - DNA, 103 bp, Homo sapiens
  misc_feature (1)...(103): n = A,T,C or G
ctgagctttcggtcagagaagaaacgcctcaggaagcccgagcngtggctnctggaanatacatgangaatatggatcagganatttgctcctaagaaaaaac

SEQ ID NO: 2619 - DNA, 425 bp, Homo sapiens
  misc_feature (1)...(425): n = A,T,C or G
tacttcgtgtggaactntcanaggtcggacaggatgaanntnnttatgctnntactganngtgttactangacgattanggcccnnntaccggntnatcnccacaggtcacccaaaagggagaaaangatactcangagatccagccagcggcccacggtcatcaacagaaggaanaggccacccatgcagcaccatcaccgtctggacctggccctgtangctgaaacaatgtngccgctgctcctctgtgggacncggtgtcactgtctnanccggcaccttctggagatcanctggggccaccctggttcacttctgannntgncttccccccgggatcttgttaaggttcctgactggntttccacaggcctgctttccgtctntgggcacctacaggacttnttacccacccttaaagtt

SEQ ID NO: 2620 - DNA, 123 bp, Homo sapiens
  misc_feature (1)...(123): n = A,T,C or G
aatcttcgactgccacagagcgngagcaccggcatgaatggtcatatgtctaaccgctccagtgggtatggagtctacccttcncaactgaatggttcggatcttcaccaccctattcccaga

SEQ ID NO: 2621 - DNA, 300 bp, Homo sapiens
  misc_feature (1)...(300): n = A,T,C or G
tgcgatatcccactattgantcggagccacctgcngatntngaagggaagaacgngcntctacttgctcacaacctgnctgacnacctantagcctatcactggttcngnggnaaacggccgatagacaacgatctaattataatgtatgaactaaaatctcaagaaacaaaacaaggaacactatatagcgggagagagacactgtnccctaatggatccttgatgttacagaatgtcaccttgaagcaatctggaatctacagcctaaatatccattctgcagatgaccaataaaaaa

SEQ ID NO: 2622 - DNA, 386 bp, Homo sapiens
tgagcctagcacagcgcccgggtcagggatgagtgggtgaaggacttggactcagaagcaaggtataggcaaccagttctgactttggaacctcagctgagagtgaagcagaggatgtgaatctttcatgagcagaatggtcacaggaagaggaaaggagttgcttaccgtgtggaagtaaaccagacagagcagaggaccacagtgtgcggcttcccagcctggtgtagcctgatgctgtgcactgcaagattcatgtggcaaattattaggaaaagcaagtgagtatggctttaatttttgtacttttacccatggggacatttttagtgttttaaatgtaagcattgcacagaataaaggtggtatacatgcaaaaaaaaaaa

SEQ ID NO: 2623 - DNA, 563 bp, Homo sapiens
  misc_feature (1)...(563): n = A,T,C or G
ctgagtgtgtgtgggctgagctcgagncctcacagcagcaggaanagcccggcaatgggacaggataggaggcaagcatcaccatcaaaagctcctggcgccctgtgcctgtgttggaagaaaagagggggtcagagaagaggagatgctcatttccgctacccaggctccagcttgcttaatcccactcccttgtcttccgctgcttcttcaatttctcctgttgacctttgtgctcantaaacgaaatcttccatctccggcngcaaatcagttccacgagtctgcaggctttctgagaagaggcaacagtgtaaacatgacatcttgggaagggttagnaatccggtacatttctgttgactggctctctgaccccagctgtgacatcatcattaggcccatatttagctccgcagagaaacaaacctctgtacgcttcacgaagaaaacagaaggcagcagacgcgatctcttttaaatactgnccattcacctttacagttaggaataagtactagaataaaaataatagtattgcagccagtgccagaaaaaaaaaa

SEQ ID NO: 2624 - DNA, 138 bp, Homo sapiens
  misc_feature (1)...(138): n = A,T,C or G
ctgagaaaggcgttactaaagatggctgggactgcatttcttgtcctagtggcttaactgctgaggggaagtgccactgtcccactggccatatattaggnnagaataatatttataaaataatggtgatgaaaaaaa

SEQ ID NO: 2625 - DNA, 432 bp, Homo sapiens
  misc_feature (1)...(432): n = A,T,C or G
cactgagggctcaaggaacctggnggaagaggaagcagaaagaatgtgagaggcanaggggatggaggactaatcaacanggncaagtcncanggacaaagtatanacacatgaataaaagacggaaattcctttttgcctcagtacttgctgtccagaattcgaattttatatatccatcatgtcaaaggtgcttctctaanataatccttgagtccaaaaggtttacttgtcccaaatgtggctcttctggtgacactggaagtaccaattacanatacaaactgtccttgaaagtggcagaatccancaaactatttttcattactgtatttgggagctgcttacatacattttttggacttacggccactggtttacacaggtaccttgaagattctattaaaaacctaaaaacccctggccgggggg

SEQ ID NO: 2626 - DNA, 457 bp, Homo sapiens
  misc_feature (1)...(457): n = A,T,C or G
ggagatgctggccaggggtgcttnatgactgtgaccctgagcctntgtcaccacagcggnggcggaggtgagcgancnnntggggaagagcctcctcaagttctgctctggagatctggggcctgagagtatcctgcctgacacgcagntnctggaccccatgcttgctgaggcgcccaccacacccctggcacaagccccangcaagggcatggatgatcgggtgttttacatctatacttctgggaccaccgggcttcctaaggctgccattgtggnagcacagcaggtactaccacattgntgcctttggccaccattcctacagnatgcgtgccgccgatgtgctctataactgcctgccactctaccactctnnanggaaacatcntnggtngggggcaagngcgcctntncgggtaacggngtttntgcccaaanaagttctccgccaccc

SEQ ID NO: 2627 - DNA, 210 bp, Homo sapiens
  misc_feature (1)...(210): n = A,T,C or G
gctgccaccccgatactgtgaatgccaccaaaaactgactacatctggatcgcctctgacctgggcaggattaataggagtgccgtggctgggatgttggaggtagccagagaaagcaggtgagcacagcacgggggctcagggaccgattccacaagctcctaagcttaagnaacnttctgaaancnaaaatccggggaattttaaaat

SEQ ID NO: 2628 - DNA, 408 bp, Homo sapiens
gactgaggactgactaacaggcaaagaagtgactcttccagaggcttccggtcgtctgggtgcactgctgacacagctgtcaccgttgcagatgccatctgccctcctcccatctccgttgtcactcagccccttcctttgtctggaccccgacttgcccttttgcctcctcaaacagccggactcagctctaccgcctcactctcaaacctgcagtcaggggtcctgactcagccacagtctccccaagtgctccggtcctgtttacctcattgtcagagactcgtggccctgagtttcccagctttggcttctcaggcctgttggaaactctgaaactccttgcatctttaaccccttacaaccattctataatctacacatatacatatatagagaaatttactg

SEQ ID NO: 2629 - DNA, 350 bp, Homo sapiens
  misc_feature (1)...(350): n = A,T,C or G
aagaaacctggagaagaacaagaagaatgatttcttctctggtaaatgctccccanggtctgttaacattcaaggatgtggcagtggacttctcacaggaggaatgggaatgtcttgactgtgctcagagggcattgtacatggatgttatgntggagaattacaacaatctattttttgtggaaaatcattacatatgtcataaatatgagaacttcttggatcaagacacacagcatattgtccatgaggatataaatatcaaactgaagtcttataaatgtcatgaacttgccaaaatcatatntgaatccagtcaaagtacaccttataaaactaacctcagggat

SEQ ID NO: 2630 - DNA, 434 bp, Homo sapiens
  misc_feature (1)...(434): n = A,T,C or G
ctgggtaagtgtggctcagtggctgaagaaggcactggatggagaggtaagcaagagtggagcggggaacaggagccccccacagatccatccggtttctaccactccccaatgccagccattgtcctgcagatcctggctgaaaacattcaagtgaccaacctgattagtgactcattgcatcggcgggcgcataacatggcagtgtcagagctgggcgcattcttgagaaggtttgccnancntgnggncccatnctctatntacnatcttgnngnaaaacngccgangggcttnttatntancnnnnctggtgcntgncttnaancaccaatcaaggntganatcttcggnctcggncctgctgccggacggggaaacttccgggggncntaactccnaggggaagctgcccttggaccaacctcaaaaag

SEQ ID NO: 2631 - DNA, 136 bp, Homo sapiens
  misc_feature (1)...(136): n = A,T,C or G
accagcctcattaattncancaacatcataattcatgctatantncntggncncagnagtttnaaagagcanactttccacaggagctgcttcacttagntctacagccagcccatgtggacttgatctctgaact

SEQ ID NO: 2632 - DNA, 138 bp, Homo sapiens
  misc_feature (1)...(138): n = A,T,C or G
tgccattttgattttangggcanaggangagggggaatctcagttggtganttaaaagcactgaggcttaaaactgcttggaatccttcatttgaaaacagtggccttntagcttnttcaagtccactttttgtgcct

SEQ ID NO: 2633 - DNA, 293 bp, Homo sapiens
  misc_feature (1)...(293): n = A,T,C or G
aagagaacccactaaataattggctgacaacaaggggaacagcttggagaagaccagctaagtctgggttcctcagagatggctgggaacttggatgtaggaagtgttttctccacgggcagatcatggaccactttccacacgtggatgattttntcaagcaggacgagacagacatcaagaactagggacagacccctgccccaacaaagacgttgaaaagtcagaaatcctatgacatgccatctctgctttggtacccagaagagagcttgagcctcttcaaaggcttt

SEQ ID NO: 2634 - DNA, 109 bp, Homo sapiens
  misc_feature (1)...(109): n = A,T,C or G
ttcatgcttggcatggngatgctgggctaccccaacttttnggccccctatggcagangctaccccngattttgctnctaacttatngntaccaatttccaagctttcc

SEQ ID NO: 2635 - DNA, 455 bp, Homo sapiens
  misc_feature (1)...(455): n = A,T,C or G
cacactctcccttcaagaaggattgcctttgctcagagacaccanacttctncnacctgcgcancgtgatctgcgcanctgtgncnnctgcgacccaagagtgcaggnccggncttanggngaggnaatcgcggncgnngnatgnctgcttctnatgcccacngaggaagagnccatctgnnccnanttggcnnccatacacacactgaaagacgtgagancctggccccgcccnggtcgnatttggaccacaaccttgnncaaaaccggttnangnnntnctnaagtctggcaaccttgggggccaaacctcgggagctgangacccgggaactcanggtcgtcngccgttgggatgtgaaagggttactcaccatccttgctgtggttgtagatgtccatggcctcctgcaaattcactagggcaatcttctcaatgaccttgacagtcctgg

SEQ ID NO: 2636 - DNA, 109 bp, Homo sapiens
  misc_feature (1)...(109): n = A,T,C or G
ctccggacctgactgagacatgcagcttccctgtgcatcactangccaccaggatatccacctgtcacctcacttggataaatgtttctgttttggagcaaaaaaaaaa

SEQ ID NO: 2637 - DNA, 225 bp, Homo sapiens
  misc_feature (1)...(225): n = A,T,C or G
aagtttccactgatggtngatgncntctttcttcaaatctctgaccttcccngtgcccacctcacanactgaacacatgccctgcnntggncatgaattaannaatgnggganatgcttgcaccttgctctgnctgggatacaatcctgtntagtgcccatttttatgtnntcctcatnanatanaaggatgccanagagtttaancattttacccaacttttct

SEQ ID NO: 2638 - DNA, 229 bp, Homo sapiens
  misc_feature (1)...(229): n = A,T,C or G
gagaacagttaagacagnnnagaaaattcttacagaacaacaagaacacatgtcangaagaggacaaagagcgtatgagcaagagaaagaaaaaggagtcnnctcttatctgactaccttaaaaganattgntcggntaancggancagttgtccaaaaagctgctcctncagatngccaaactcaacagcacttgactggaccccgnaaccttgcgggacttcatctc

SEQ ID NO: 2639 - DNA, 395 bp, Homo sapiens
  misc_feature (1)...(395): n = A,T,C or G
ggttgctcgaagaaagcactggaaagacaatacgttcactccttttttaaacgagcacgattttcaggaagctgctgctccaccccagcctctctctgaacagtcatcagcagacaaccacaagaggatggggagagtgtctaacttctccgttaggaacactcaagaaggaaataaattcaagaggaaagactattcttcccagatagcagaaggagaacaagattcaaatttaagagagagaagaatgaaccgtgtcaaagaatgatgcaaataccaattctgccttctgggactctcttcatttggatgatgcaacgaaggaaagttcacacagaagggagagcgcctccgcgtggaataagaagaaattgncggncggccccaaagtccca

SEQ ID NO: 2640 - DNA, 148 bp, Homo sapiens
gagatttcagattttgcagcctaaggaacattttccaggggagactgccagtgcagccaccttggcaaccaagatcctgatccagagccacatagccacagactggagtactggtgggccacagtcctcaaataccttctcaaggcag

SEQ ID NO: 2641 - DNA, 405 bp, Homo sapiens
  misc_feature (1)...(405): n = A,T,C or G
acctgccatgggcccgtccagcgccttccttggcgtcctgttcctctcggggacactgggtctcaccacttccccagccagaggacggctccgctgttacacctgcagctttgccaagccctgcgaccctgttcccagggagtgtcnagaggacgaggtgtgtggtgtcagtgttggcacctcagagcaaaaggaggaggaagtcattgagcggaaaggctgcctccccagagcccagtgccctctgctgggccatgcgacctactggtcacggtcctactctctccggcaccagtgctgtgagcaggacctatgcaatgctgccgctcacagccaccccccaaccttcccctcatgactcttgctaccccttgcaagccatgatcggctgggggaaggacatga

SEQ ID NO: 2642 - DNA, 424 bp, Homo sapiens
  misc_feature (1)...(424): n = A,T,C or G
tgattctccccttggcaaactgcagccagccagcctcctgggtcgagagccaagccaaaagatgtctgagagaagaaacctggggncctgcaaaggtaagtgggncccagcccactctcaatccccctctctctgtgngattgctattccacactggagtcacctgctctgtgcttctgaggaacctcacctctggcacatcaatgganattgtccttccctttttatntatatnnatttattntttattttttgccaccctcactggccactaanagatagccctagctcctcctctcctgcctggttttgacaggactcactccattgagnccttgtctcgtctctttggcagcccttcctncttccccccccctttatatccntntanttttttgacccnccctttgttttaaaaccccgt

SEQ ID NO: 2643 - DNA, 296 bp, Homo sapiens
gaggcgttgctgctggagcaggttaataattctatcaccaccctacagaggaacctggagaagcaagatcgtcaacggtgactaccacccttggaaagcatttggaaaagtaaagttgttagtgaggctaggttgtgatgtttttcctactggctctaatgttaaaaaaatattagggaacaatatgaagttcagaaagccacactcttattagttaagcaagggaccttttatggtcagggaacaagaacagtggcagcactggctgaccgtgagatgccaggacttggaaggtg

SEQ ID NO: 2644 - DNA, 187 bp, Homo sapiens
  misc_feature (1)...(187): n = A,T,C or G
agccagatgaaggacctgtattcctaggnatttgggagactgatgnacnaggatcangggactccaagaattccagatcagnctggacaacntgagatgccaggacttggaaggtgaaagtataggaacttctcgacctgcaggcatgcaagcttcgacttcgtgagatgccaggacttggaaggtg

SEQ ID NO: 2645 - DNA, 200 bp, Homo sapiens
  misc_feature (1)...(200): n = A,T,C or G
gactgagtctggctcttttctagtatgttcaggtgggttcttggaaagaatccagcatgaatattattngaactgggagattcctgaccagaacattgatatagaagcactgcaggtcgcatttggatcactgtatcgagatgaccgtnttaataaagcccagcangggtcgtgagatgccaggacttggaaggtgtgct

SEQ ID NO: 2646 - DNA, 107 bp, Homo sapiens
  misc_feature (1)...(107): n = A,T,C or G
agaagatgtgaaagaaaaagaccgngctaaagaaatggcacgccagttccacagttgttgaagatatcacaaaggacgagcaggaggaaacaccggaaaaaaaaaaa

SEQ ID NO: 2647 - DNA, 172 bp, Homo sapiens
acactggggttcccagactgccctttgagaataaaatgggaggccacaaccaaagtcttttggataaagcaccacaatggacaatactgttttgaggtgctcctgtccagcctctatttatctacttctctactctctctgcctctactaaaagtgaagaagaagaaaaaaa

SEQ ID NO: 2648 - DNA, 485 bp, Homo sapiens
  misc_feature (1)...(485): n = A,T,C or G
gactgagggatggaaccaggccctccaacttctgtgaggcctagccctgtgtcaggctacaggagtttgagattttcagcccctgaatgtatgtggcaaggccattagactcactttcgccagctcgngaccatggatatgaggctgcaggagtttgagattttcancccctgaatgtatgtggcaagaccattanactcgctttcgccagtgaacagtgggcggagcgatgtctgtcactggcaagnggaaacattcaactgctgccgcaggtctctcctgttctcttcttctttgtgggcgcatcnaagtcacacacagaggctggcctgcatctgtcangttgcangagngaccggcatggcctgaaccgccctgctagcctgtaacacatgtacaagactcgggtaccgnggggaaacgtgtgcttancatgggaaagggcccanggttaancttaagccccnaattaaccaaaaccaaag

SEQ ID NO: 2649 - DNA, 109 bp, Homo sapiens
ctgagtgacatcaagaaagcacggactacttctcaaatctggttcgagaaacaaaccctacactggtcttttactcattaaagggtttttatagagttaaaaaaaaaaa

SEQ ID NO: 2650 - DNA, 169 bp, Homo sapiens
  misc_feature (1)...(169): n = A,T,C or G
gactgagattcccccaccattnanaacctggaggcactgggcccacaaagccttgctggnaaggtccgtcttcattcattatncanacaaagtggcnatgnggagntgcttttaaanagctaggnacatgtttagtcaaatacatccctaaaaaatgggtgaagaaaaa

SEQ ID NO: 2651 - DNA, 139 bp, Homo sapiens
  misc_feature (1)...(139): n = A,T,C or G
aagtgctctgcgctctgctattaaccccatgaaaagagttctttccagataagcggatacttgcggctgcgtggagtggatcccagncccagtttgctaccagcaatcccaacccaagacacaggttcttggttaaaaa

SEQ ID NO: 2652 - DNA, 178 bp, Homo sapiens
taagtactctgcagtgggacagatgccgtggaaggctggtggcgctgccttctggatgacactggcactttatagttttctacggaaagattagtcgcaaacaaggcttgtagaagtcactttgttgttgtttttttaacttttaattacttaaataaaacccattgttttcatagta

SEQ ID NO: 2653 - DNA, 315 bp, Homo sapiens
  misc_feature (1)...(315): n = A,T,C or G
tgactacactacattcancccatntagcaagcttgtccagatngaatatgcttnggctgcagnanctggangngcnccttcagngggantngatntntgaacctnggtaacaaccttgcacatattggaaggagagaatcacttcttgcaagttaacctcggctgactatggtgggccataccagtaggatctgctgaagaatcgagcagaggcaggagaagcccaagtacaggtaatcctctggctccacatctgtccctaaacacacacatatatgcaataaataaataaatgcaattttaaaatgaaaaaaa

SEQ ID NO: 2654 - DNA, 142 bp, Homo sapiens
gtaccttgctgaactcttaaatggttctaagagttcacacgaggagtctggatttaaagaaacacgatgaacagttttattgtaagttccccgcaaacttttgaatctgagcttccatttactgttttgtatatatgcaggg

SEQ ID NO: 2655 - DNA, 440 bp, Homo sapiens
  misc_feature (1)...(440): n = A,T,C or G
agactgagaacatcggatcagaagttgagacttccctattgagaagcagcggaaggaacttcagctgctcatcggggagctgaaagaccgcgataaggagctcaatgacatggtcgcagtgcatcagaggcagcttctctcctgggaagaggaccggcagaaagtgctnaccctggaggagccctncagcaagctcgaaggtgagctgcataaaaggactgacataatcaagtcactgatgaagaaggtcaagaccctggagtccaatcaagcagagtgccagacagctcttcagaagacgcagcagcagctccaggagatggctcanaaggccacacacttcacccttcttttggaaaaacnttgaggttggctttcatttctgatggactttattagtctgaatgctgggcttccaatgtcaccattaaaagcagagg

SEQ ID NO: 2656 - DNA, 247 bp, Homo sapiens
tcagactgggtctgcagctgcccagaggaagttcgctcactcgctcagagacttcaagttcgagtttatcggcgatgctgagactgacgatgaacggtgcatagatgcctccttacgggaattttctaactttctgaagaatctggaagaacagagagaaatcatggcattaagtgtgactgaaaccctgattaaacccttggagaaattcagaaaagagcagcttggagctgtaaaggaaaaaaaa

SEQ ID NO: 2657 - DNA, 312 bp, Homo sapiens
  misc_feature (1)...(312): n = A,T,C or G
ccgagttacccgtgccacctgctnccacccactgacngagctgcgtntctcaggggacctggcagccgcctggatggcacagttgtggctgctttccacccatccttcggagtggatttccccaactctcagttcagcaaggaccgtctgttctttgtcagagcgagaccagaaacaaacgcggacctgcnggatgccacactgggccttncgggggactgagggtngaaggacgagggcaatttacacctgcgaagttttgccacntttcncaacgggtncccggcaagggggggtgaccttggctttaga

SEQ ID NO: 2658 - DNA, 348 bp, Homo sapiens
  misc_feature (1)...(348): n = A,T,C or G
actgactgagaaatcttcaagcaagctctatgtgggngaaccggannnngnnncangtgaaagctanaggttatnananttacaaanaaaggaatgcccagcaggagctacagataatatccctgagagatgacatcaagagccttcaggaccttattgattctctaatgaagatgaagattttgaaaaacacaaattttnaaantttngaanaacccactgggatctnactgagaagagtctaaatctaaaagaacccgttaagggaacatctggtggggaagaaangagattaangcggagcttctgggagaaaaaggcggncctggcccaacaactttttggcct

SEQ ID NO: 2659 - DNA, 179 bp, Homo sapiens
agactgggtggctgaagccgtactattttatagcagtcatggagatcaagtgacgatgttacaaacccagaacaactttggaaaatgaagccaaagggaaacctggaagatgacagttactcggtaaaataatgactataatagccaataattaaaatgtatacatactaaaaaaaaaa

SEQ ID NO: 2660 - DNA, 218 bp, Homo sapiens
  misc_feature (1)...(218): n = A,T,C or G
catgccaactccagcagcanaaagaanttgacaggggccaggaggcccacttgtgccaagggtttggcaccttggagggtgtagtggagcgtgcagttcccaagctggctgcgtgtggagtggctcgcagcatctggacgggcttacagtagtgtggaaatctgcatcggtgcacgtaaaaccaaaaccaaaccaaacaaaagggagaaaaaaacaaa

SEQ ID NO: 2661 - DNA, 165 bp, Homo sapiens
  misc_feature (1)...(165): n = A,T,C or G
tgtgcctctgtctcagctgatattactctgccaatcancctgagtccctggangtggcaagaaactgcagtacaccaccagaagatttttttttactgngattctctctatggagncctgacaaatgcagctcaactatgcantgtaagatggaccaatacatgc

SEQ ID NO: 2662 - DNA, 462 bp, Homo sapiens
  misc_feature (1)...(462): n = A,T,C or G
gactgagccccagaactccagntgaagctccagtcggctgggcacnatggtgcacatctacaatcttattacatgggatgttgaggcaggaggatgccgagttcagtgtgngcgtgcatgtgtgtgtgtatatttatatatgaattactatatatctcaagaccatgtctcaacaacacctacaaaaataaagangctctagtcagcataatcagtgtttgcagccttgacccaaaacaaaaaggnngnnggctcagcnccatgagaacactttngggggagacagagggatttattttggcagcatcgcctgnggnttcacttganttttgaattaaagacngcgaaaaaagcntaatggccnccaaaggggacctggctaccttantaanggtgnagggtaantgattnaatcgaancccttcctttnntttttaaaggggggatttgggatcatatttt

SEQ ID NO: 2663 - DNA, 206 bp, Homo sapiens
gaactgagtcgtgcctttccttctgggattgtaagtgaaccccgtgatcaagtgttcaccggttcacctgtttacactgtgaagtgggtatcttacggagaacacaccagccttggttttctcacgccccgtgaatgaatgtgtacgccacagttttacctgctgatactgtaaggtctgaaaataaagtgaatgttttccctcca

SEQ ID NO: 2664 - DNA, 226 bp, Homo sapiens
ctgaggtataattgtgcaatcagcagctctgatgaccgcagtctctttcgacgactgaaactgaattatgcaatttttgatgaaggccatatgctgaagaatatgggctctatccgctatcaacatctaatgacaattaatgtaagagtgtgctttgtaaataattgtgataaaatttatctttcctaatttaatacatacacacatgattttaaatcaaaaaaaa

SEQ ID NO: 2665 - DNA, 146 bp, Homo sapiens
  misc_feature (1)...(146): n = A,T,C or G
cctagatcctcagagcttgaatatatnagcaagacagaaacaatgcttatatnaatggaggagannaaacnnaggntnnnngcgaccancagctcaagggcagtctggattacaaaaagagaccctgtctcggaaatagaaaaaaa

SEQ ID NO: 2666 - DNA, 383 bp, Homo sapiens
  misc_feature (1)...(383): n = A,T,C or G
aacgtctgtgagcagtgaanactttcatatgaatgactccgcatggatgtcagctcacccccgagtntcttacatngcagatccctgcaggctatcaagagaagnggtggatgatcatctgttanaccagggatagtttacaggacccatntgaaancatttttttttcctntcaccactnaacaaatggacagtttattcccaaggacggttttggnganaggcangctgggcnagnagggncttggnngactttgancaggtggaacccatcttgtncctccctnattttctaaagggcccacaaantgacntccacaggngnnttttagggnattaactaccaggtnatttcttacaaaaatgcttgctttgaaactcaa

SEQ ID NO: 2667 - DNA, 181 bp, Homo sapiens
ctgagtaaacatcggtactttcagaatataggaatgagaggcaaggaagaaaggacattcatcatacgaagatttgaatcactttgaaactgtaaagggatgtagcacttgctgccaaactaccttgctcaccagaatgaaggaagtgcttcagcattaaatggtaaccataatcctccta

SEQ ID NO: 2668 - DNA, 168 bp, Homo sapiens
  misc_feature (1)...(168): n = A,T,C or G
ctgtggagaagatggaatgacagntactatgctcanattcgcaattacgaanggtctgctcgaaaatggaagatgtagacccnagtccttncncccagatggacagagacaggatncatctcacatgaacctntacagagatggaatgcggagagcactctggcatcc

SEQ ID NO: 2669 - DNA, 382 bp, Homo sapiens
ctaatagggatgccaaaggaaaaatatgatcctccagatcctcgcagaatttacaccatcatgtccgcagaggaggtagccaatgggaaaaaatctcactgggcagagttagagatctcgggtagagtgcggagcttaagtacatcactctggtcattaacacacttgacagcactgcacctaaatgacaataaccttgctcgcattccacctgatattgccaagcttcataatctggtttacctggatctgtcatccaataaactcagaagtttaccagcagaactaggaaacatggtgtctctcaggtgaggaaacatttcattatatacaattacaaatttatcaaataaaaaacttatgggatgcttaaaaaaaaaaa

SEQ ID NO: 2670 - DNA, 231 bp, Homo sapiens
  misc_feature (1)...(231): n = A,T,C or G
aagaggtgcatccatgccaagcacggtgctacatgcatgcccatcccagcactgagagctggagcaagaacatggcgagtttgaggacagcctggacctnctatcccagaaaggctggaaatagtgggatagggggacccaaaccacggatggtctgaaaaacaagatggaagcagattgcctccctttaaaatggtcgctatgggaaccccaaaaataaaattaaaaaaa

SEQ ID NO: 2671 - DNA, 336 bp, Homo sapiens
  misc_feature (1)...(336): n = A,T,C or G
gacctgaccatgcagaggatgatgctcgtgacggttaacgcctcgaatcagcnacggcttgccgttcagcagcagcagaccattttcaatccgcacctcgcggaaaccgacatcgcaggcttctgcttcaatcagcgtgccgtcggcggtgtgcagttcaaccaccgcacgatagagattcgggatttcggcgctccacagtttcgggttttcgacgttcanacgtagtgtgacgcgatcggcataaccaccaccgctcatcgataatttcaccgccgaaaggcgcggtgccgctggcgaccttgcgttttaccctgncataaaagaaacctggtc

SEQ ID NO: 2672 - DNA, 261 bp, Homo sapiens
  misc_feature (1)...(261): n = A,T,C or G
caatcacccgttgaggctttatgctccagngatnaccctgcaaagcaagagaagatgaatcaccacnccggaatnggttcaacagtctacaacaanagtccaagataaccctcacctcncntgactagtgtgcaggcctgaccaagcgaggnacagctgaaagtttgagcccatgtttcattggaaaataanctgcctgcatctcnctgngnatcaagcgcctgcccttcgtcntgcatgncgttttgttttgcaaagccc

SEQ ID NO: 2673 - DNA, 168 bp, Homo sapiens
  misc_feature (1)...(168): n = A,T,C or G
ctgctgccttttctgctcctgaagccatgctcctgacagcagcggcctgtggtgacagtagtgagacctgcttatcagggtgtactaccgttttgtcattcaaactnaattacnccaattcagttgtntaataactcagaaggcatanccatatttttgagtattgtg

SEQ ID NO: 2674 - DNA, 147 bp, Homo sapiens
  misc_feature (1)...(147): n = A,T,C or G
atgcaagtacctgctcactccgcccttctntcttacncacccaggccccccaaccctaagccaacttgagtccccactctgtcaccttgattccaatgaagatggtgtggatttctnatactanaaataatagcgctctttgttttg

SEQ ID NO: 2675 - DNA, 102 bp, Homo sapiens
  misc_feature (1)...(102): n = A,T,C or G
ctactgcagacccggccccncaagcncnctgactgaaaagcngggcatccgngtntctgagtntcttancaataaagngaaatgcaatcttaaaaaaaaaaa

SEQ ID NO: 2676 - DNA, 172 bp, Homo sapiens
  misc_feature (1)...(172): n = A,T,C or G
agactgagaaatgactgcacgactgagcaacctcngaggcagngtcatcaatgangtagtcctgagtttgcttaagatacatgtggccctacctcatcctggaggctgggggtgcccttcagcactccacactccgtttcaataaagaataactaaatcccaaaaaaaaaaa

SEQ ID NO: 2677 - DNA, 106 bp, Homo sapiens
gactgaggatcttacttgccttggctagcctggaactcacagagatctgcctgcctcctgccttcccagttgctagtattaaaggtgtgcaccactaaaaaaaaaa

SEQ ID NO: 2678 - DNA, 160 bp, Homo sapiens
  misc_feature (1)...(160): n = A,T,C or G
ggcgtccaccatgaccancagangctgatttttgccggcttgccgctagaaaatggctcncactctctctgattactacatccatnaacgagttaacacctgcacctgncctacnnctnaggggtgnntattaatnattcaggagctgcattactactgg

SEQ ID NO: 2679 - DNA, 140 bp, Homo sapiens
  misc_feature (1)...(140): n = A,T,C or G
ggatccatgcttgggtctggctttgnaataaanatcaatgctncggacgcactgnnatgcntgaacatctatcagggcntgctcaaagtatcttgtgctgangagtggcnggaangtatcgacggagggcgaacactcca

SEQ ID NO: 2680 - DNA, 330 bp, Homo sapiens
  misc_feature (1)...(330): n = A,T,C or G
gagactgaggtcccagtactganntgataacntagtcttacaacccaacnagaatacnaacagttntnaaaaanccttgncnttggnganctctaanantttgatccagcanccaggcaggatacacttgttggcccaaggtcccnaacttatacagangaggactgcctggnctggactcatggangnacgacactcctaatccttgagagacttgaagtcccagggattggggagggcctggcaggatgttgttgaatggttgtgggtgtnaaggccccccttattgaaaatgtaccaaagggtcgggatatgggatgaaaaactgtt

SEQ ID NO: 2681 - DNA, 141 bp, Homo sapiens
  misc_feature (1)...(141): n = A,T,C or G
tagaaaagccttggctgtttgccacgngcctctggaccactacgactttntggatcaaatctcaaggagctnganggangatgancgtnncnagaanantcnnntccactgttttgcaagaagttacaagggaggacctta

SEQ ID NO: 2682 - DNA, 122 bp, Homo sapiens
  misc_feature (1)...(122): n = A,T,C or G
ctgggaccttgaatttaanttctccctatgantanntggatgctgannccgtgaaaagagctaaaatgaaccagacctctgcgtgtgactattaaaaaccctgaaaagtccaaaaaaaaaaa

SEQ ID NO: 2683 - DNA, 343 bp, Homo sapiens
  misc_feature (1)...(343): n = A,T,C or G
gctgggaacaggggaagacactctncctaccganggctnattntgttggctgngaagaagagngggaatgataccttgggnagaaagaancttgaagctnctggccagaggacacttgcctttgaggagcttcgnaggcagctaganaanctgctgaatgacggnggcagcaatnaaccgtgtgttcgactgganggacnncccaaccttaaatgagccagcaggattagccagtccanttaccatntagtttnggagccccttcatggacaaaccntgtcctgtttantttntgcaaattatcttttgaagactccctcttccgaaggtggggattggtccc

SEQ ID NO: 2684 - DNA, 336 bp, Homo sapiens
  misc_feature (1)...(336): n = A,T,C or G
gccgagaggctgggctgagctggagggaatttctagcananggccacagangttgngcatttgntggctgnnnanaaggtgngaatattccttnggagaanaatcctgaagctnctggccagangacactttgcctttgagggancttncgtangcaancttnanaancctgctnaaatgnaccgcgggnatgtaatcaacccgggtgtcttcgacttgggatangaccgccccnaccctataattgaagccagccangattagccattccaaattancattttattntcngaagccccctttatttgacnaacctggncctggtttattttcttg

SEQ ID NO: 2685 - DNA, 167 bp, Homo sapiens
  misc_feature (1)...(167): n = A,T,C or G
aaggtgggacaggagncatcactctgncaatnaanctgannntgcggaaaggaanagaagccacaccacaccaccagagggtttttttgatgcatttctctctatggagctcaactatataacgtaaggcagcccaatacatgtgtgtcattagtgaaaaaaaaaaa

SEQ ID NO: 2686 - DNA, 348 bp, Homo sapiens
  misc_feature (1)...(348): n = A,T,C or G
atctcatggagaaaagctgtcgaaactganganaacanaagtncngatggggctctngcggntntgaaagcttgnnangtgtcnacagagtcntcatngantctgcctanncanagggaatnnatccngnctntttttttgcccagattttgattggtcttatttgcctgaagagaaagctgttccggatcangcttcaaggagcacttcagaaacatctggtaatattgtcagaccaggngaacccccaacanaanatgtgtcanacttggtntataacanaatganctggnagcaagatttanaatgngcaaccaccaggctttcagaaactagaccaatggaggc

SEQ ID NO: 2687 - DNA, 238 bp, Homo sapiens
  misc_feature (1)...(238): n = A,T,C or G
agcaggtgctgtcacctggtcacctcacacattgaccagagtatcacgctgaaaagtgatctcattctttcatggatgccancatgaagaaatcatgggattttggtttttttaaacaaaancattgnatattanntttgcttttcttcttcaagtctcaacacataatcctggctgacctaaaagctcactgggngaacccagggggacctttacnttgggggactggagggggcct

SEQ ID NO: 2688 - DNA, 269 bp, Homo sapiens
  misc_feature (1)...(269): n = A,T,C or G
caccttcccccagccactggntgaaatcctcagtggttattcatgaacacgcacccaccatgttttatgggactcagtngatcatgtctcctcccaccaagaataagctgaagcgacagagccagctcctatccacaatgctgtcccggacactgagctacaaagtattgagacctggattccaccttctgcagcctangtgccagtgacgacccctcagagctcttcacgcanctcttnggcccccggngtcctcaaggtcgtttgga

SEQ ID NO: 2689 - DNA, 192 bp, Homo sapiens
gggcttacctcagcatgtatgtctgtctcactgacatcactctgccaatcaagaccttggaagcagccaaaaactgcagcataccaccagaagattttttggtgcatttctctatatagaatcctgacaaatgcagctcaactacacaatgtaaggtggaccaatataaccgtattgttagcaaaaaaaaaa

SEQ ID NO: 2690 - DNA, 208 bp, Homo sapiens
  misc_feature (1)...(208): n = A,T,C or G
tgactgtgttggggcatggagtaccataccgtcctggaatgccttgcccaggggaagacagtgagtgttctaagtgctctgcacacttattactcacagnggaaaactaagaactttttgttttggtttattttttgagacaaggtttctggctgtcttggaactctctttctaagaccaggctggcctccacctctcaaattggctg

SEQ ID NO: 2691 - DNA, 427 bp, Homo sapiens
  misc_feature (1)...(427): n = A,T,C or G
agactgagaacctgctcaagccgctgccatggatcccaggccactaccttctttcaagcaanaanaagttntacgaatgtgggcttntggacaccggaaacaaagtgggtggcagtggtgggcccgccgcgtggactgtctgaagctatggctcatgtggaaggcacagggtgggcaggggttggagcggcgcatcgaccaggcctttgctctcacccggtggnccntgtgctcnaggancncatggtgaagaatnggaccatgacnannnggtaccaancncatgggacccggccnanctttttnccaatgggngnggncaaccccatactggccnaggcccanataaatntccttctgggcaaactgaaactcctgggccaggacctgtgaactgcttttgnttttttggcccacccaaactttg

SEQ ID NO: 2692 - DNA, 306 bp, Homo sapiens
  misc_feature (1)...(306): n = A,T,C or G
cactgaggatgacacacgagttgtgagagtgaaggttataagctggcataggcctggccaagaaagacatcttgggagccaggtttccctgggaactgcctgtgaccaactccaggggatntggcgccctctcctggnctccacaggcactgcncacatgnncacacaacttaaatctttttaaagaagaaatgttaaagcaggttaaagctcctggtgaagagaaaggaaaagaccatcnnaagtgataaatacctggaatctacagatgcttttttttttaattaattaaaagttttatttttg

SEQ ID NO: 2693 - DNA, 101 bp, Homo sapiens
actgaggttcccagagtctaccttgtgaaatgttttaggctaaagaagagtccagcaacagctaactgagagacctgaataaaagggtaaattaaaaaaaa

SEQ ID NO: 2694 - DNA, 133 bp, Homo sapiens
  misc_feature (1)...(133): n = A,T,C or G
cattgtcaaaattctagaagacattgaanggcatgaaagaaggcntattggaganaaaccctatgnaccgtnatcaatgtggnanagcctttgcatgttacaatcatctccaaatacataagagaacacatac

SEQ ID NO: 2695 - DNA, 196 bp, Homo sapiens
  misc_feature (1)...(196): n = A,T,C or G
cttgccctgctcaagtccctacggaacaagcgaggcccacgtgctgctgaaggatcggtngctcctcttcctggaagncngntttctcctagcactctncanatgaanacgtanaacnntcanctctgnctacatcatgcctgcctggatgctgncatgcttccaccttgatgatggactgaacctctgaacctgt

SEQ ID NO: 2696 - DNA, 633 bp, Homo sapiens
  misc_feature (1)...(633): n = A,T,C or G
ttagactccgttagtgccctgctaagngaagatgnattaaactcgcaggtgnacaaccaacgagtcaagcatntctgctactaccacggcatgaagccctatctatgctaccagctggagcagttnaatggccaagcgccactcaaaggctgcctgctaagcgagaaaggcaaacagcatgcagaaatcctcttccttgataagattcggtccatggagctgagccaagtgataatcacctgctacctcacctggagcccctgcccaaactgtgcctggcaactggccggcattcaaaagggatcgtccagatctaatnctgcatatctacacctcccgcctgtatttccactggaagangcccttccagaaggggctgngttctctgtggcaatcanggatcctgggtggacgtcatggacctcccacagtttactgactgctggacaaactttgtgaacccgaaaaggcccgttttggccatggaaaggattggagataattagcangcgcccacaaaggcggcttcacaagatnaaagagntctngggtcttgcaaatttggtgaatgacttttgaaacctncagctttggacccccntgtcttnagaaggcaagaaaataatttaagaa

SEQ ID NO: 2697 - DNA, 303 bp, Homo sapiens
  misc_feature (1)...(303): n = A,T,C or G
gactgagaagaaaagggggtcaaaagcgggccaccgacgcnccacnccgagaacaaccacatgattgntncaanccctaagcccncgctgnatgtcctgncctnaaganganccctgatactgctaaatncctgctttactgtgnnnnngccaaaagaaaaanttccactgccccatccctactgctgaggtgcatttccnctaccccattcctcctgctgagaagaacttcccntttngcttgggcattnaaacnttgggcctggntaatacantggggccttgatgctagtaaaaaaaaaa

SEQ ID NO: 2698 - DNA, 103 bp, Homo sapiens
  misc_feature (1)...(103): n = A,T,C or G
caaaaagatatcttcntagggatngaccaagtaatactggagagaaaccctttgaatgnnttcaatatganggagcctttgcnagaaaccatcatcatcagtt

SEQ ID NO: 2699 - DNA, 375 bp, Homo sapiens
  misc_feature (1)...(375): n = A,T,C or G
tggttccaggattcggctcanaatgacgtcangagaaggcanngcnggtttttcntnttnaggccatgtnttcctacaccgctcgcaggcaggaatgttctcacatgggacctttctncagancagatcangacgaggacagaggagctcatagcacagaccaagcaggtgtatgatnccgtggggacaatcancctggaggatgtatcttacganaactgtntgcaggtgctggctgacatacaagtgaagnacataactggaaaggaccatgctggacttccctcaacacgtgtcgtctgacngagaagtgcgggctnnnagcncaaaagcggacaaaaggctttctngntttgatattgagatgagcctgaa

SEQ ID NO: 2700 - DNA, 359 bp, Homo sapiens
ctgaggagaagatggaggggctgaaagacaagaccctgcaggagctggaggaaatgcagaatgacccagaagccattgcccggctagccttggagtctcctgaggttcaggacctgcagttagaacgagagatggcactggccacgaaccggagcctggcagagcaaaacctggagttccaaggtcccctggaaatcagcccgctctaacctctcagacaaataccaggagctgcggaagcttgtggagcggtgccaggagcagaaagccaagctggagaaattttcctcggcactgcagcctgggaccttgttggaccttctgcagatcgaaggcatgaagatcgaggaggagtctga

SEQ ID NO: 2701 - DNA, 426 bp, Homo sapiens
  misc_feature (1)...(426): n = A,T,C or G
actgagtggccagaaccccgttcccagtgagaagcttccagtgcctgacagtgtgctaagtatgttccccagcacagaggaagggcctgaggacgacagtgcaaagcatggcggtcgaatccgaacctttccccatgagcggggcaactgggccacccacatctacataccgtgtgagtcactgactaaagtgcctctagctctggctaggaggaagacaccagggctgctgtgtgctggactcanctcccaccgcanacctgaggagacaatggaccgcctaactgctgaagtagaccttcctgcactgggtgttntgtcagctactgggtgnntcatttctgcacctctaaagtgggggggatgctatctatctctttggaaagattaaatcagataatctatgccnattagcccaattcgcaa

SEQ ID NO: 2702 - DNA, 616 bp, Homo sapiens
  misc_feature (1)...(616): n = A,T,C or G
actgagaagcaagaagaaacctcaagaacctagctcagatctgcaagataagaacgaggagcaggagaagtcctccagttgcacaggggtattcaaaggtggaccattctttttctgtctgacctgtggcaaatgtttcaaaaagaacaccttcctctttaatcaccagtttcctgtgaggtcccggaggctggcagtcacaaatccacaaagccgcaaaggcaagggctacaaggctcagcatcgtggagagaggcctttcttttgtaatttctgtggcaagacttaccgtgatgcttctggactgagcccgtcccggacgtgctcatttaagttataggccccgttcatgccctgagtgnggaaaggggttcccgggatcaagctgagggcaacccgcacctgaaaggacaccaaaacaaagccagcagctacaaccaggctggcaaccaggctacaaccagaggnttgaagaagaggggtccacctacacacctaaatccaagcgcccgcctcaaatatttaaagtgatcccgggaccatggcccaggctaagnaccgaaaacggacctcanccttgatgcagatcacttntttcaggggccttaaaaaaaaa

SEQ ID NO: 2703 - DNA, 331 bp, Homo sapiens
  misc_feature (1)...(331): n = A,T,C or G
tttgcaaggatggaacctgnctgctgcaagctatgnactggagtgctgctgcagccgctgnctntgctgctactgcctcttattgacgcagatgaaatattgatgctgtggctgctggctggagcccagccagcccgggccagggtgggggcagggagggcgggccaaagagaaggcatgcctcacggggataccagcgagcagggcccgggcccctactggctctattctgccctgctgactcttgttggccccgggggagggagaancgtgttggaggctggacatatcctaatctatcattgcacctcattcatccttggaaaaaaaa

SEQ ID NO: 2704 - DNA, 115 bp, Homo sapiens
tccagcttctcctgcgccatacctgcctggaagctccgaggcttctgccttcataataatggacagaaactctgaacgtgtaaaggagcccctattaaatgttatcctttataaa

SEQ ID NO: 2705 - DNA, 111 bp, Homo sapiens
catcaaccagacccggctcgagttccacttctctggtagaatggccagcggcatggaggtccggcagacccgcttcatgttcttcgtacagttcccccacaatgccaccca

SEQ ID NO: 2706 - DNA, 189 bp, Homo sapiens
  misc_feature (1)...(189): n = A,T,C or G
agactgagacagggtctcatgtcgtcctgctggagcccacttcatcatgtanctgagggcgaccttgaccttcctgctgccttccacgtgctgggaacaagtcttccatcactcctggcctgaaacgttgcctctgatcctagcaccatcatagagtaatgaaattcatataaagtgaaaaaccgacta

SEQ ID NO: 2707 - DNA, 177 bp, Homo sapiens
  misc_feature (1)...(177): n = A,T,C or G
tatatttcaaaaataagcctgaacacaccacctggcacaanagtgaagctctctggcactgtnggcnttaaanaacngattcctgctcttaagtgaactctaacaccacagntcttggtggtgaagnggaacacctaattgacaagtgggctttacanagaagcttattaaagcata

SEQ ID NO: 2708 - DNA, 121 bp, Homo sapiens
  misc_feature (1)...(121): n = A,T,C or G
tccactaccaacattgctggacatttcaaatgatgaagtctcctntgggggctnngtcaaaanccttttcccaantccncaaaaantcccttnaaaaattgnggaacccgaacccttgtcc

SEQ ID NO: 2709 - DNA, 106 bp, Homo sapiens
  misc_feature (1)...(106): n = A,T,C or G
gactgaggatgaaggcttctctgctctaggctttccctcagaccctgaagacatctgtnnctcatttcccatctgccccaataaagaagtttctatgtcaggcaaa

SEQ ID NO: 2710 - DNA, 434 bp, Homo sapiens
  misc_feature (1)...(434): n = A,T,C or G
ctgagggaaagacacctgcctaagatcacaggtcaaaccaggcatggttgtttatgcctgttctccaaacattaaggaagtanacgcaggaggatccgagttcgaaaccagctctgaatgnacagagaattcgaggccagctgggcctacaggacccgtttctcaacaaccaaccaaccatggaaaccagagaaactttgatcctcagagagatctanaagcctgctgaagcctgcaagcaagcctacaacctccctcaagcttcctcgccctaaaccgganagtcaccccctgagcctccttcctgctggggaacccactccttggtcagnagtctccaaatgaagaaaccggaagagccagagccgactgangtgngtncatgaacatgcgcaagccttcgngcgggtggnttaacttctggtttttcccaa

SEQ ID NO: 2711 - DNA, 191 bp, Homo sapiens
  misc_feature (1)...(191): n = A,T,C or G
tttgctacttaaggtaccaagtacctggctccgtgcatttcacaggcncagtgggcanagctgtaagctacattcaggcttnccttggcacttaaggantttccaattccttgcctgcctttaactggggaaagctccancaatctntggaaggttctctgggcaaatgactactgctgggaggcattcaa

SEQ ID NO: 2712 - DNA, 314 bp, Homo sapiens
  misc_feature (1)...(314): n = A,T,C or G
ggcatgaaagaactcntgctgganagaaaccctatgantatgcncatangggataaatcctncatatgtctccntcatcttcaaaagcttgatngaaaccannctagagacagacactctgaagtctttcnccatagtnaagtgctgcgcgtgtcgaagtcctctccanatnnataaaggaacagacactgcncataaaccctacaaaatnantagctgggaacgattgcttttttnngacccgacactctgatgtctttnnacatagnaaagtgcttgcgtgtcaangcctcttgcaaataaataaaggaacc

SEQ ID NO: 2713 - DNA, 356 bp, Homo sapiens
  misc_feature (1)...(356): n = A,T,C or G
gcaaagggggaggcgtgaattattcaccccctttttaaacaagagggtgctctgcagcttcgcccactccagagccatctttgatcctaagttgccaaaatgactgaaccatcacagaagaacaactccactcaacaggagctcactaaccacttgtttccagagaaaagcantcagattggacagaagcaactgcaacagatngaacggcagntaaagtgcttggcatttnaaaaccctgggacctcaggtgggnnngatttttaacccncgaggacatggcaggtagnaaaaaggaatanncggcggnatngttncaagcatngaatggagctaccttttttcctgttgaaagt

SEQ ID NO: 2714 - DNA, 404 bp, Homo sapiens
  misc_feature (1)...(404): n = A,T,C or G
ctctggtgcctctgagcctcgtgggcagtgccagcaacaccagcaggaggctggaccaaactccagagcaccagagagagcagagcttgagacagcaggggcctccatcttctctgctgcccacagggcaccttgctgtccccacaaggccagtgggcccatggagggattgtgcagaggctcacggggcaggtcactggcagagtggagtgtatgacctgcggctgggccgtcgtgtagtagccgtgtggtgtgaacagcagcaggaaggtggaggctggactgtcatccaaaagacggcaggacggctctgtcaacttnttnaccaacttggcagcacttacaaaggcgggctttgggcgtccagaangaaaatactggctgggcctggaacctgtgcatca

SEQ ID NO: 2715 - DNA, 217 bp, Homo sapiens
agcgagcccgagtgcagggaggctgggctacacctaccaagagccagtctgctactcagccagcttcccctgctaggagccgtctttcccagaccgcggggccagcctggaggagcaaggaacagcagcaatgtgaccgacaatttgtgttcaaagaacctcagctggttgtccgtgcagccccagaacccagagtgattgacaagggagggtgtgg

SEQ ID NO: 2716 - DNA, 376 bp, Homo sapiens
  misc_feature (1)...(376): n = A,T,C or G
ggcctcgagactatcatggagggctccccgngcnaaggcctgtacttctttgngtncgnaagctgcagtgcatttgtggtgactggggtcctgctgattctcttcagcctcaaccttcatatgaggatcccccagatcaactggaatctaacagatttggtcaacactggactcagcactttctttttctttatcgcctcaatcgtgttggctgctctaaaccataaaaccggagcggaaattgctgccgggatatttggcttcttggcaacagcagcctatgcagtgagcacattcctggccatgcagaaatggagagtcagcngtcccgccagcagagcactaatgactacatccgaactcgcaccgaagtcga

SEQ ID NO: 2717 - DNA, 171 bp, Homo sapiens
agactgagggctgaactgaaaaaggatcaaaggcgtctaaaacgtctttggagccccctctgaatacatctgatggtgtatacgcagctaacagacattgggcgcaacagaactaatcgactgtgtgatcggttatgccattaaattctttctagaagctgaaaaaaaaac

SEQ ID NO: 2718 - DNA, 236 bp, Homo sapiens
  misc_feature (1)...(236): n = A,T,C or G
cagttcctgcagcagcttaacatcttggattataagcatgagactcaacatccagcttgaactctccatgctcactgacgtggataacttcttcaccgcagcaaccttcaagaagggtctacagaaaattagcattagtgtaaatttcagtaatgactgattaactaaatatatgtttaccagaattatcaaacttttnaaatnaanagtcataccatcaaattgaaaaaaaaaaa

SEQ ID NO: 2719 - DNA, 384 bp, Homo sapiens
  misc_feature (1)...(384): n = A,T,C or G
gaggtggggtctttcaagaagcacaggatgtcatcctgcaactgagaaaagaatgctactaccttacttgtcagctgtatgcattgaaagagaagctaacttcccgacaaagtgaagaaacgactcagngctgcaaangnnattgnggaanaaangtgaagatttgnngccananacatnattgnntttgccgncggttgatacaatcctgangagctgagtncantcattgggactnnccgngctggaaagagaactgnncntctncnccccacnnaaagaagctgnnctctgatctctatgcatgcttcctcgngcctccccccaaataagtaaataatgttttaaaaatgtatagacaaagaagaagaagttttaaaaagc

SEQ ID NO: 2720 - DNA, 380 bp, Homo sapiens
gaggcgctgtgaaacgcgtggacagaccaatcccgacctgaggagagctggttccttcctggggaaggcgcagatttgggattttgaacttctgacgctctcgccaggaaaaggtgcgctctgtgtcagtgtatccaccatgtcgggcgtgcagtccaaagcagccaggcttcaaaaggagcggaaagaaaagctgtcggcagacagggagagaaaaacggccacatctctgtgcttaaaacacagcgaagtacctgcatccatgatgaagcagtttaatgctttaatggaaatgcaagaggtgatgtttgcagagatgagagaaacctataaaaacgatataaaggaaatgcttgttaaaacgaacagcaccttgggtg

SEQ ID NO: 2721 - DNA, 328 bp, Homo sapiens
  misc_feature (1)...(328): n = A,T,C or G
acactgagtggcaaagtgctaaccacaccctctcagcaggatcccgcgcctcaagagccttaggtcccgccccacactccctcaaaccctcagtgcagcgcttgttgtcaggcgcaatctcgcattgatccggngaggcngctacgtngagctccactnggncccaaaagtacctgcaagcgctncacanttgcgctcggcncccttgctttgttctnactttccgagatatccactgcatcttgagtcctgcatccactcccgggaggcggctgcggcaagctcngtnatggaaanaaagagcgtgataagccagctagacaggtgg

SEQ ID NO: 2722 - DNA, 165 bp, Homo sapiens
  misc_feature (1)...(165): n = A,T,C or G
ctgaggaccgctgggcagaatgtcacgatggatgaggggggcctgcccctgctccccgacagncttgtctaccanatcttcctgagtttgggccnnnnnaatgngntggctactgggctgttataccatcaanggcaagctgagtcnggaatgagttcttatggc

SEQ ID NO: 2723 - DNA, 383 bp, Homo sapiens
gaaactgagcatctgcccaagaaaatgactttccagcccttaaatcatggtttttcaacatcagcaaagtgcttaacgcctcctccttcaaaagataatgctcctgcgttgaacattgaggacctcatagagaaactgcaggctggagtgatggtaaaggatcagattagtgatataagaatatctgacatcatggatgtttatgagatgaaactttccacattagcctctaaagagagcaggttacaagatctcctggaagcaaaagccctggctcttgcacaggctgacagactgatcgctcagtatcgctgtcagagaacgcaagcagagacagaggcacgaacacttgcgggtatgttacgagaaagttgaaaaaaaaa

SEQ ID NO: 2724 - DNA, 122 bp, Homo sapiens
  misc_feature (1)...(122): n = A,T,C or G
ctgggcagacggccataatngcttactngtgnaactctnatgcggnacggccaaggcagaacagactntannaaagaancngngataattcaggccaagangagaaaaacagcacaggatgt

SEQ ID NO: 2725 - DNA, 147 bp, Homo sapiens
  misc_feature (1)...(147): n = A,T,C or G
acagactgagatggacagtctgaggctgagagagggctagtgatttctcggacacttgggcagtagnaccnataccanccngtactnngggatncganggcnntggagagggngctgcaacagccccttgagacgaataccactctg

SEQ ID NO: 2726 - DNA, 455 bp, Homo sapiens
  misc_feature (1)...(455): n = A,T,C or G
atccgaaagtggacccccnnttagcgcgcgctncacctacaagatgaactcntaggcgaagaaacnctgtggtactgcccactcnccccgcncctcccacggatggagcaanattctggaggacgtgcnaggggcacccgctcaagatcctgttttcactgccctggccccggaagancccccagacccatncccaanggctgaggactctgagatccatgncntgagcngatcttccatcaganccgggcctaccgtggctatanaatgagaggctngnggttcncgggggaagctntgagacagaagtacgantggcctttngcanaacttggatatccggctngaatnaagataatcantcccncnttgnacattctgccanccnccctanatgccttaaggtttacanccgtagattggtntctttggtacncaagagcccttgggcatcc

SEQ ID NO: 2727 - DNA, 270 bp, Homo sapiens
  misc_feature (1)...(270): n = A,T,C or G
ctgagattaccaaagagttgtcagctgtttccaaggtcgccgtgggagggggaggatggagagatggaggaaatccctgctgctgtcgcaactgggcgaacccacaggccttggcagctgggggctgcagctggtgaccttggccacaggcactgactgctccctgtcccctcaggacctaccccatccccagccacaccactaccgtgattcctccaaagatccaaaactttaattaaaaaaaagtcttntaaaaccgaaaaaaaaaaa

SEQ ID NO: 2728 - DNA, 308 bp, Homo sapiens
  misc_feature (1)...(308): n = A,T,C or G
gactggatgattgtggtctcctggacggactgccgagccactgaattacacccatcttctggccacactacagaagttgtctatggagttgaaatgtttattgcagtaacctctgaccttatgtgatttaaggaacngnnntcctgagatnagaactgntnngccnngaagancaangagaaaacacggnagccgctgttgancggttcacatttgangtcaantccacncctaccaaaagcacgttngntgtgcacaganagantttcggggggtnatttgntggangtgttcagtgtgtgctaagc

SEQ ID NO: 2729 - DNA, 171 bp, Homo sapiens
ctgggtatctagccagcttccaggaccaggtgattggaaacctcagtgatttgaactaagagccaacaaagccttgggtttgtggcacactcttcacattctttgcacagctctttttgctgttaaaatctgcactggatttttaaaaatgaagcaattgaaaaaaaaaaa

SEQ ID NO: 2730 - DNA, 270 bp, Homo sapiens
  misc_feature (1)...(270): n = A,T,C or G
ttagggacatcacataaggacctncancctcagtctnggactgtacgtctnctaatgtgaggaagaatattctctgctggcttntatcctactgacactgggggttganctgcctttgnctgaccattcttttattngctttatgttnnntntaaaacaaacttttatntgnntctgganantataaaataacaggccnnggaggncnagcangccnttgaatggacatgtgaattattgtcttgcatgaatgctctacggccaccactt

SEQ ID NO: 2731 - DNA, 339 bp, Homo sapiens
  misc_feature (1)...(339): n = A,T,C or G
caccaccccccagtgcccgttccacgcccttgcctggaccaccaggctccccgcgctcctccggcggaacccccttgcactcacctctgcacacgcctcgagccagccctacggggaccccaggaacgacgccacctcccagcccaggcggtggcgtcgggggagccgcctggagaagtcggctcaactccatccgcaacagcttcctgggctcccctcgcttcaccggcgcaagatgcaaggtcctaaccggcngagganatgtccagtttgacaccagaatcttntccttgagctggcaaaacgctcctgggttcgggaatttcatcttcttaagaa

SEQ ID NO: 2732 - DNA, 387 bp, Homo sapiens
  misc_feature (1)...(387): n = A,T,C or G
gactgagctgtacggttctgtgaccggngccatctaatnaagccagaccgctgccatcactgttctgtctgtgccatgtgtgttttaaaaatggaccatcactgcccatgggttaataactgcattggattttccaactacaaattcttccttcagttcttagcttattccgttctctactgcctgtacattgctacaacagtcttcagctacttcatcaaatactggagaggggaattgcccagtgttcgctctaagttccatgtcctctttctcctctttgtggcctgcatgttttttgtcagccttgtgattctctttggttaccattgttggcttgtcagcagaaacaaaactaccttanaggccttctgcacaccagtattc

SEQ ID NO: 2733 - DNA, 148 bp, Homo sapiens
  misc_feature (1)...(148): n = A,T,C or G
ggggaactctcaaaaggaacggacgggaancatggctggtcatcatatantgcactgcctcgnanncnangaattacgggctcggtaaacganatttttgccctcctccttgagtgtatcttatgggcagnggttggaaaaaaaaaaa

SEQ ID NO: 2734 - DNA, 273 bp, Homo sapiens
  misc_feature (1)...(273): n = A,T,C or G
aggactgtggtcggcanacatgctaggaagaccacaggctgccaccctggtggacgccctgggaagtggggagagccagagatacctggtagtctccggagatccatcagagggaccgagttctgttgttgaagcagaagtttccccctccaaaatcatctaattcttttgcctgcttgtggaagacacgaaagggtcacgtgtgtctggtttctgttttgtgtgnttttgngtatgtgtttaaaagctatgtaaaaatctagagaagcgaaa

SEQ ID NO: 2735 - DNA, 225 bp, Homo sapiens
  misc_feature (1)...(225): n = A,T,C or G
aactgacttttttcttaagcaccattaactcttnccgttnnagggttntnctgnantncagagccatgcagaatgtgctaagcggcaaagcctganngtctccantgagtgactgtnnagcgagagcaggatgancctgctgcantcaggangnangtggccnnttgcctctgccatactgatccggacttcctcctgtgtttgtacggcaaaatatccaagcca

SEQ ID NO: 2736 - DNA, 133 bp, Homo sapiens
agtgctggctttcctggaacttgctgtgtaaaccaggctctcctggaactcaggagatttacctgctcctacaggcatgcaccaacatacattgatgtattttatttacataaagttttacatatttacaaaa

SEQ ID NO: 2737 - DNA, 177 bp, Homo sapiens
actgagatgagagactgaggagcaggctgtggggatctcagccatagtcgttggcttcatggttccagcaggatgggtcttagcccacttggagagctataaaaagagctccgcagcatgaagttgcacatccctgagagatttcattaaacatgtccatctgcctaaaaaaaaaaa

SEQ ID NO: 2738 - DNA, 200 bp, Homo sapiens
  misc_feature (1)...(200): n = A,T,C or G
tgaccgtcattgtcaacatnaagtngatcctggncactcggagagcaatcagcgaggccaatgaagncccagaaccagagcaagactatgatgaggccctaggacgtctggagtcccctcggcgcagaggcatcattccngggacggtntnctggatgttttaantanactccantaggaagcaaagtgaaaaaaaaaaa

SEQ ID NO: 2739 - DNA, 301 bp, Homo sapiens
gactgaggtattgcctgttggggtgtagttgttctggtagaccccaaagggaagagccacccagttatttgaaaataccagcagttcattgttgtctatcatcactggcttctgggcagacagaacaagcgttgggttggtggatattcgttgcacacacggccaaggatgtacttaactgtaaggacataccgagaagattgtgaagatatgagctgtcattctttggccatggatgcttacggtttaccccctctcagattataaagagacaaataaaccccttggaagcaaaaaaaaa

SEQ ID NO: 2740 - DNA, 108 bp, Homo sapiens
  misc_feature (1)...(108): n = A,T,C or G
ggtaacaatgagagtgcgatagatccattaataactcatctgggatatntgtntcanncttcaagtgtaccacagcgtggaaacatggtctggtaacaccactgcttt

SEQ ID NO: 2741 - DNA, 262 bp, Homo sapiens
  misc_feature (1)...(262): n = A,T,C or G
ttgctcagtagctggagtnacagtcngnngngagctgcacaacatgagtgctggagaacgaaactttcagtcntntgnnacagcnggnantactttccagccacangagctgtccctccagccctgctctgcaagcgtngtttttcacggttcacccantgctgtgtgtcattcctgntctgggcggnntgantagtgatnccattgcatggatacataccacgttatttatttatcancntattcatgttatcaatttgat

SEQ ID NO: 2742 - DNA, 121 bp, Homo sapiens
  misc_feature (1)...(121): n = A,T,C or G
ttagactgagtgctgattatanacctancaacattaagacagaagatntcnggaagggacangaaangaaaatcagaagaggaagaggatggtaaacttaaanngcccaagaatttgatca

SEQ ID NO: 2743 - DNA, 225 bp, Homo sapiens
  misc_feature (1)...(225): n = A,T,C or G
cctagggttaggattccncgcngacngaagaccccagctctntaggacttccctgggactctagcaccagatgggactgnngagacagccagtcttctgaactgaacaactacngngatncttgccctttcantcaggagacagccactgttgggctgctataaccacagcctntangccactctaataaatccnatatatgtatattcattgtaaaaaaaaaaa

SEQ ID NO: 2744 - DNA, 172 bp, Homo sapiens
  misc_feature (1)...(172): n = A,T,C or G
attgaacgcgttttgggaaaaccccttgcaangggccccggggacanncgagaggncgnacccgcaaaaagctngaagaggancggacacccttacnnngggagatggtngcggngntcccataccataaaccacctgcccattacaagcctccagcaacacgggcgagcga

SEQ ID NO: 2745 - DNA, 256 bp, Homo sapiens
  misc_feature (1)...(256): n = A,T,C or G
atgaggagtatggctgtcccattctacatgaggatagggttgtcgatgagttanagcatcaaatgcagganggcngngngattgaggattaccacgggctganacttgcttccccggcgctgattcatatagcggttgtnnnncaaacatatcnggtgcnttgtatacnccanntctncngaggggtnataaggaaaacaagctnctgcgaccatnntctgacgtnagggcttcttccctaatgtatggaggagaa

SEQ ID NO: 2746 - DNA, 216 bp, Homo sapiens
  misc_feature (1)...(216): n = A,T,C or G
gggaatttctcaattttgctnagaggacattgnacatggananatnggaggagaactacaacaatcnattattngtgatncttatcacgtnaatgggacaaatgatttattggtttcacngttncangatantgactgactatgantcccttatgctctgcaacatctccttcctcattgccctgtaaataaagctgagtattttaaaaaaaaaaa

SEQ ID NO: 2747 - DNA, 216 bp, Homo sapiens
  misc_feature (1)...(216): n = A,T,C or G
tcgactatattgttgtgancggttcagccaccaacactaccaatggnaccnatgggaatttggngccggtancgaccnacanaaggacnagtgtttcgngcngcntcnnatagcngcagaagggcaccttgcncggctaccactgnggattccatccatcncagcgcacctcttaaactgctgcctaggacagantaatacttgacaataaaagct

SEQ ID NO: 2748 - DNA, 227 bp, Homo sapiens
  misc_feature (1)...(227): n = A,T,C or G
tccagactggatggagagactgacagtttaacacttggccaaggccatatacctggtaagnggnanagctgctctgngngantccaaagccctcactttttgnatntttntanaantganatatgaattntttcatacaaggaaaaggangaataaanctgtgggggcatgagcnncncctgggcngagnttgctaatcattnaacccaccatgatgaaaaaaaaaa

SEQ ID NO: 2749 - DNA, 374 bp, Homo sapiens
actgaggtcccgggggtttgggaggatcagtgcattatgcccaatggctaggtctgcagtgagacctgcgagccttaacttaaatcggtctcgaagccttagcaacagtaacccagatatatctgggactcccacatcaccagatgatgaagttcggtcaatcattggcagtaaggtaaaccgaggacatgctatccacttatgagagttattgaagtatttgatttattcttaattttaagatgtatttaagttcaaagtaagtatgaatttttttattttacttgagttagaaaaaagcaaaatattcctattttgtcagtaaataccttacacatttctattaaatatgtttgctgttaaaaaaaagcctt

SEQ ID NO: 2750 - DNA, 228 bp, Homo sapiens
gaactgagggtagaattgactggacatctgcctgtgaagaatagagatgctcagaagcatgacggcaggctctcagcaaacatggtctactcaccgaaaaagcttgcagatgctgcgattactgctaggagagtctccatgtaccttttggtacttcttgatgctccagtgaaagaccacggatgggaatttcccatgacccctctcttaggaacaaaacaaagactg

SEQ ID NO: 2751 - DNA, 123 bp, Homo sapiens
  misc_feature (1)...(123): n = A,T,C or G
gcctgtcgtcagatgccgcgnnagcggaaaccganctctgcctagnggagagtcctccgtcatcgngtgacnagcaaacganaacgaaagggactggncntgcnccccggggtcgtcaaaaca

SEQ ID NO: 2752 - DNA, 366 bp, Homo sapiens
  misc_feature (1)...(366): n = A,T,C or G
agtcttgctatgcagatctggccccccngcgtgataattctcctgcttctgcctcccgagctggnatgccaggcctgtnccaacacacccagcttttgtgtgagtccatcacagtgagcaagaccgaaagcaggcagcttctctttgtttgcggttggaatgcttaacggccgctggaagtgagtggccagtggattgtgcaaagccgatacagagatacagagcacgcccttccacctggcgttccggccagagagctctccagacagcacccgtcccagaatgcgcttgcgcaaaaccagggatgtttgtccggtttgatcattgctgtgtggcagtgtccaagtgaagcactgcaaataaaac

SEQ ID NO: 2753 - DNA, 107 bp, Homo sapiens
  misc_feature (1)...(107): n = A,T,C or G
gactgaggtggcatccactagactgagggagacatccaggtaccnccngccagtggagagagttcacttaccgaataaaactcaagtgaaccccgagaaaaaaaaaa

SEQ ID NO: 2754 - DNA, 329 bp, Homo sapiens
  misc_feature (1)...(329): n = A,T,C or G
tcagagaggacagatgctacggtgaacccccgctcattctttctaaggaatcccagtgaaaatacatttgaactggtccccctgggggatgaggaggaggaggagaaaaatgaaagcgtcctgctggagggtagggcagtctacttaaatataagccttcctcctcacacgccgcctcctcccttnatctccgaggacgcctncggatatctgaccagcccctggctgacgctcttnatgccctccgtgtacacgattgtgttcattgtcagccttcctctgaacgtcctggccatngcaagtgttcgtcttgaggatgaaagtcaaga

SEQ ID NO: 2755 - DNA, 204 bp, Homo sapiens
  misc_feature (1)...(204): n = A,T,C or G
ctgaggtttcagtgttagagagcatcggggcggagcttgctgacgattcccactgcctctgccagccacctagctgntccggagctatcacgtggtcacctgcaaccttactccaagatgatttggccggaaagggccccttcccctgcttcctaacccagngtcagaaatagtaaaatcgaaccttgatctgaaaaaaaaaaa

SEQ ID NO: 2756 - DNA, 120 bp, Homo sapiens
gaactgagatagccagtcccaagaaaaaacaaccacattgtcagactccttcctcagcagagtgagacgtccacgttggcgagccgtgagatgccaggacttggaaggtgatcccctgtg

SEQ ID NO: 2757 - DNA, 401 bp, Homo sapiens
gactgagctctctggcacagctggctattctcatctcagaagaaaggagaagagactttctgaagatctggtagagaagatagaagaaatttggaatacaaccaaaaggtacagcaagggacatttaattttgcatgtttatgaattgtgacacttgtgcaaatgtgtgtatggtttgttcccaaactgtcgccgtagcaacaggtcttggcactggaggctggtccagcctactgcttctttccactcctgcacccaccctgcttcaggggtccctgagcctgtggtcatttctgccttgggggtcccagctcctaacttgggagcacacgcgcacgcacatacacacacgtacacagactctgttctcatccaacagcagatccacagccttcgtaaga

SEQ ID NO: 2758 - DNA, 407 bp, Homo sapiens
  misc_feature (1)...(407): n = A,T,C or G
gactgagaaccagcagagcccgtggcggacagacagagacatgggtttgatgaatgcaattgggctgcagcctcggaacccaaccacctctgtgacatctcagggcacccagactctggccctccagttgcagaacgctgaaacacagactgagagggaggaagaggaaccaggggcagcatcttcaggtcctggtgaaggcgagggctcagaatatggtggcagtggggaagatgccctcagcaggatccagaggctgatggccgagggtggcatgacagctgnggtacaacgggaacagagcaccaccatggcctccatgggtggctttggcaacaacatcatcgttagccaccgcattcaccgcagctcccaaacaggcacagagtcaggggctgctcgtacct

SEQ ID NO: 2759 - DNA, 285 bp, Homo sapiens
  misc_feature (1)...(285): n = A,T,C or G
tccaggagggtggtccanctggcaagcactgcagctctanatattanagatgcggntgtctcacgctctagtcttctacacaanttaactctgtgnggcattgtcctagctggaaagcctttttcttttgttctctgccctaagcaggggtacctctggagccagaggttcataangttnttctggaaaggatctagatgaacngaggttntttancanggggctggaancnttggntttnataaaaanttgcctttngtttnaaagaaggcttggtttcaaagg

SEQ ID NO: 2760 - DNA, 369 bp, Homo sapiens
  misc_feature (1)...(369): n = A,T,C or G
accactgtataaatgggaagcagctttcgaggctacagcggaatgtgattctcttcgtcttgggctttctgattctctgtggattcctgtactctcttcatacggctgaccagtggaaagctctgagtggcagacctgcagaagtagagaagatgaagcaagaagtcctgcctgtcttaccagcgccttagaaggaaagtgctgaacaagaagggtttgcagacatactctctcagaagcggcaaaggcattttcggnggggccctccccatctgcagattaagaccccccaacacagtctccaaggatgggatgcaggatgatgctaaggagaagagaancagccctggggaaggctcagcaaggaaa

SEQ ID NO: 2761 - DNA, 416 bp, Homo sapiens
  misc_feature (1)...(416): n = A,T,C or G
gactgagtcaaggtgaagagaatgggattgactgcagccaaggagacaagcctgcggagcggggcaagcgggcccgaggcagaggatttggacgtggcaggggcagagggacaggaaggttctccgctcaaagcatggggacattcaatcctgcagactattcagagtccatgtctacagatggctgtgggacaaagttggcagtttgggaagctgctcanaatggtacagatgagggaccgggattgtgagtgtgtacacacaagctgtggagggcagaanactttccgctagtggattacaagagtgtactcaggatctccggccctaatggtttgatcaccaatccagnggaancaaacttttattccttaaaaccaattacntgaaataaaaattatcataagcattaacct

SEQ ID NO: 2762 - DNA, 444 bp, Homo sapiens
  misc_feature (1)...(444): n = A,T,C or G
agactgagctgcccaatatgttcggcgaccttcggtccacatttattgccttgatgattggatcctacgcttcctcagcagttaccttcccaggaatcaagctcatctacgacgctggcgcctccttcattggcatcctagtggtctgggctggctgctctggcctggtttttttcaactgtttcttcaactggccactcgagcccttcccaggcccagaggacatggactactcggtgaagatcaagttcagctggctaggctttgaccacaagatcacagggaagcagttctacaagcaggtgaccacagtggggcgcccgctgagcgtgggcagctttatgcggactgccaaggagcaagccgccctgcaggagggccacaagccggggtggcccctgggggaccctggagggnaangccacctgatgctttaacgggccc

SEQ ID NO: 2763 - DNA, 174 bp, Homo sapiens
  misc_feature (1)...(174): n = A,T,C or G
tccaaaagggctggagaacttacnngnngatgagngtggagcagagtgatcaccatnattgcnnaacccacgacagttcaagatcccangactggttcctgaacagacagatggatgttgaaggatgggaagtacatgccaggtttttggccaacnggtctagacaacaggctg

SEQ ID NO: 2764 - DNA, 103 bp, Homo sapiens
  misc_feature (1)...(103): n = A,T,C or G
ctctacactagacgggagatgctgccaagtgccccagacgggatcaagactccagtgacanccataagattcnctaaagctaagacactgcaaaaagaaaaaa

SEQ ID NO: 2765 - DNA, 184 bp, Homo sapiens
  misc_feature (1)...(184): n = A,T,C or G
gggagagtcatggcaagcangcncttggaacaaggacactacagtnngaacncnttcnactacaancggaagtcaaggagaactgaaagtgnctccnngaaccctganatgnaaanctgagaagagtgctgcgtgcanaatgcttcnctggatgtttttttcctctattctcacagacaactgg

SEQ ID NO: 2766 - DNA, 324 bp, Homo sapiens
  misc_feature (1)...(324): n = A,T,C or G
tgaggatcagaccaggcttctttgggtcttgtctagagatgtccnacaaaacctcaccaaccaagaagatcaacgggcagaaatgaccccaccatcaccgtactatccacagagcaagatctccaagaaggatacttatgacgcagggacagccacccagaccacgtgagatgccaggacttggaaggtgccaaccaagaagatcancgggcagaaatgaccccaccatcaccgtnntatncacagannaagatctccaagaaggatacttatgacgcagggacagccacccagaccacgtgagatgccaggacttggaaggtg

SEQ ID NO: 2767 - DNA, 127 bp, Homo sapiens
  misc_feature (1)...(127): n = A,T,C or G
ttgaaagcctttggtgatnacgcctccantnctagacgggagatgctgccaagtgccccngacgggatcaanactccaatggnagnnataatattccctaaagctaagacactgcaaaaaaaaaaga

SEQ ID NO: 2768 - DNA, 218 bp, Homo sapiens
  misc_feature (1)...(218): n = A,T,C or G
agactgaggattggtggacanaactggcagtnctctaccnagcagtncaacccctttgccagatttnagcttccatgtgtgcacatttagaaagtgatggacagaactcaccagagngatcctcaacctgagacaaccaacagtgaagtgtggagagccaaactgacccaaggcttgcttagagtaaatgtaacttggggtaaatgtaaaaaaaaaaa

SEQ ID NO: 2769 - DNA, 265 bp, Homo sapiens
  misc_feature (1)...(265): n = A,T,C or G
actgagatctacccagcatgaaggctgtgcttctcctcctgtgcgccttgggaaccgctgtggcaatcccgatgaatgggagccggtttctgacagctgaatcatcanaaaccaagctctatcaccttgatcaagcagttcacgggaaacannnaatttatgacagacgctangaaccntgcctaactcatgtggagcagtcccgtngagtttacacactgtactctgaaattataaatacgggacaaactaacataaaacagtt

SEQ ID NO: 2770 - DNA, 356 bp, Homo sapiens
  misc_feature (1)...(356): n = A,T,C or G
agactgaggtacctgtaggagaccagactgtgggaaaccagaccttcaacagctcccaccctgagaatcaatngaccctttgttgggagccaagccacccctccttcacacaaggctgatcagctgatcatgagaaccaactgacccttgtcctggccagacacctggggctgtttgggtggatccagcatccaaagataagccacaaaatgtttcaagcctgcactcagcatctgccccagatgttggtccctctctctgtgctttgatcattccccctcagnccctccctatttcctctcactgngtgcttataatcaggctttcagcttccattaaagtagaccttgacaacc

SEQ ID NO: 2771 - DNA, 124 bp, Homo sapiens
  misc_feature (1)...(124): n = A,T,C or G
ctcatccatgatcgcatatnatcctcacaacagtaccagatagtggggtttattacgcccaatctccanatggtggaactgaggttcangggttaggtnactgccctgagatcaccaggcaaaa

SEQ ID NO: 2772 - DNA, 249 bp, Homo sapiens
  misc_feature (1)...(249): n = A,T,C or G
cctgcctggctcttgnttggaagacangganacttagatctacttanagaaaaaggcaattctgaagatctaccatcatctaatcccttcnagtcaggtttgagggccagcagagatgactggaacccatgctgngggaggagagaaccaactcctgccagntgntctctgacctccacacatgtgccacagcttgtgcaagtgtgcactcacctgaataaatgtcattttaaattctaaaaaaaaaaa

SEQ ID NO: 2773 - DNA, 113 bp, Homo sapiens
gtgttaagttttgatccctttacgggagatgctgccttgtgccccagacgggatcaagactccaatgacaaccataagattccccttagctaagacactgcaagaaaaaaaaa

SEQ ID NO: 2774 - DNA, 430 bp, Homo sapiens
  misc_feature (1)...(430): n = A,T,C or G
gatggctgatgagtcccaggtgatnagccnntcgtnccgcangaccacgttggngttcaccggctctgaagactcnncatcggncctaagagcaaangaggatgatgacaggcgcttgctganggaacctgactgacttaagtnctggactgcttactgacaatgccctgtgtctgtcngattcaatatatttggcaagagggacccattctctgngagtntggaannacttccaatgtacccatnttntntaccangangtccatttttatatgaacannctatgaacccctntcaatccacattagcttaattnccaagantaaaaacagancgaggggtggccagatggctcnaccagtagtngaaaaaagtggncanggtnatnngaccgttcttcatgcgnattttttntgtatggtggctgcat

SEQ ID NO: 2775 - DNA, 159 bp, Homo sapiens
  misc_feature (1)...(159): n = A,T,C or G
aattaaacctagaagagcttgggntcaaaatgtcattnacccgnctcgaacgccggcgcatcaagttcaggcaaggcgggcacccactggcatcaggtccgagtgttccaccagaacgtcttccccaacttcacggttgtcaacgtcgaaaaaaaaaaa

SEQ ID NO: 2776 - DNA, 295 bp, Homo sapiens
  misc_feature (1)...(295): n = A,T,C or G
agtgtctcacaggagctcaccatnagcctggagaagctgnaaaangacaagagcatncgaggggtcatcctcacgtcggaatgcccgggtatcttctnngctgggctgnacttgctggagatgtatggccggancccagnccactatgctgagnactggangaacgngcaagagctgngnntgagactctncncgtccaacatgatnttagagtctgccatcaatggagcctctccanntggngggtgnctcttggctctctgctgtgactacagggttatggctgacaacccca

SEQ ID NO: 2777 - DNA, 261 bp, Homo sapiens
acagactcgagtagttgcactttgctccataaacaagacatgaggactatacccagagtactctcgtgccttagaagaccccagagaagcagaacgttatcttgaatggctccagcaaaatctgtgtgggcaactgaaatgtaagtcggttggtgaatcctgctttcattagttcagagatccccataaattggaaagagaatccagtgaaattggtaaactatttcaatactttaataaagccctgaatttatacaatag

SEQ ID NO: 2778 - DNA, 144 bp, Homo sapiens
  misc_feature (1)...(144): n = A,T,C or G
tgaggtccaggtcaaggcctcgtcccgctcacatagtagaagcngtgaaagatccagtcacagaagaacccgtagcaggtccagggacagagacagacgtaaagtccgggacnaagagaaaagagaaaaggagaagaaaaaaaa

SEQ ID NO: 2779 - DNA, 115 bp, Homo sapiens
  misc_feature (1)...(115): n = A,T,C or G
aaaacacctccagcanccaaccangcatctgaccctgaggaaaaagggaancctggcagcatcaagaaggccgaggaggaggaagaaattgacattgaacctctaaaaaaaaaaa

SEQ ID NO: 2780 - DNA, 531 bp, Homo sapiens
  misc_feature (1)...(531): n = A,T,C or G
ttagactgacgataaaccgtttggtgagagccatggcactcaaggtcctacctctacacaggacggtgctcttcgctgccattctcttcctactccacctggcatgtaaagtgagttgcgaaaccggagattgcaggcagcaggaattcaaggatcgatctggaaactgtgtcctctgcaaacagtgcggacctggcatggagttgtccaaggaatgtggcttcggctatggggaggatgcacagtgtgtgccctgcaggccgcaccggttcaaggaagactggggtttccagaagtgtaagccatgtgcggactgtgcgctggtgaaccgctttcagagggccaactgctcacacaccaatggatgctgtcttgcggggactgcctgccaggattttacccgaagaccaaannntnggttgttttcaagacaatggagtggtgcccttgcggagacccaccttcttccctacgaaaccacaatttgggaatgtggtgccaaggnggcagcanaccttttaaaaaaaaaaa

SEQ ID NO: 2781 - DNA, 241 bp, Homo sapiens
  misc_feature (1)...(241): n = A,T,C or G
cgtgtgaagagctatggngacagaagcccagcatcaactgttaagcnccagaagggaaggctnatcgccatccgggcgctgtctgctcncaccgaggaacggctgcagntcagttcctaagcactaagcatcntatgagcatcttagcagttttacttcacattctcacatttgttttgaaaaataactgttcaaattataactgcagccatttcagaaagtggaaaatgataaatattaa

SEQ ID NO: 2782 - DNA, 384 bp, Homo sapiens
  misc_feature (1)...(384): n = A,T,C or G
gaactgaggctggactggggnatcatggtggantgtnttcnggccctgacattgaatagctactatnttcataggccatcagcatttgtgaagaaangtnttngnncactcacgaggacgtggnagagcaaanggatgcacaggaatnttcngagactgnattttcataagcanaaaatnattntanccngannacctatgcatgcccttntgnggggnctgntgnttgctcttctgngggctggaanatcccttctcctggnactgttctcacttcttagatttatatgtgacttgtgttgcattaaagnnttactgaactgngccngggangggnacaggtatcagnactaccaacaaccaacgggaactgctgctgctgga

SEQ ID NO: 2783 - DNA, 232 bp, Homo sapiens
caggcattggaggctccaagggcccttgtaaagacatgtccattgcgaagtgaccagaagagctaccccgaggactaatcgctaatgcttgggatagaagaggaagacctaagcatgcagacctcccctgctttctgcctttctgtcacagtgtgttcatcatactcaagggccagcaagatgatccagcgggtgtaagagggtttcaaccgtgtgcaccttcccccccccc

SEQ ID NO: 2784 - DNA, 136 bp, Homo sapiens
  misc_feature (1)...(136): n = A,T,C or G
cactgagctcaagactgagtntgcncaaatcttantaaaagccantcntagtacagcttggngatacaacccctaaaaacagcacacccaccatgtttaacctcatgaagaaagataaggacaaagatggcgggcg

SEQ ID NO: 2785 - DNA, 409 bp, Homo sapiens
  misc_feature (1)...(409): n = A,T,C or G
tgagagttgtacccggcgtggctggccagactgtcaaagacgtaacgcaaagagtcctcctctaatttttttctgccgggaatcttggaacccttgtgagacaaaggcngcctgtgtgactcctctgtccaatagacacttctgcgactcctcagggcagccggtcgtccccgagccaaggacaaagactcgcagcgcggccaanggatttatagcgacgtccccaagctgccgagcttgtcacccacngagcctgacagaaatgcggaatggatctgttttaacagagaagaaaaagcaggccagtttttcgttaacccccccgaaccggannaagatccgaaagttnaagcattgttggggaaaactggttccccgggcnctgnntttcgtgaatgaaataaaaaac

SEQ ID NO: 2786 - DNA, 398 bp, Homo sapiens
  misc_feature (1)...(398): n = A,T,C or G
actgggcccaagagggagccagattncntgacacggagacatctgtccagccaccaaaagaaggtacaaaatatcacagcacctgctggaattccaactcatgaccttcgggagaacagtttgtgtccttgacgctaagctacctgttctcagnttttacatttgacctttgggcatcatggtgccctgaggggacaagaacaggatagggaatctgcgcatgctcactcgccggaggcgggtttaanncgtgtgncaagtatttttctttttggaagaaatgaagattttacttaaactttataagagatgagaaatnaaacccacgtttttctggggagcacgaacgtgccccgcggtccctggcaaacttcttcccggttcttgcgccaaaatgg

SEQ ID NO: 2787 - DNA, 660 bp, Homo sapiens
  misc_feature (1)...(660): n = A,T,C or G
actggagaacagcagcagagaaaagaaaagacagagccaaaggccttctgagtcaagcaaagaacggaatgcaccccgcaaagaagaccgcagcgccagcagcggggcaganggtgacgtgtcttctgagcgggagccatagatgcggatgcaggagctcagcaaattaccattgggcagaattggatcctgaaaaatcaagatgctaaagcccctacactgctttaagaatttgggactcaaatatgaaaagaaaatcagaaataagaccctgggaacctgaatatccctgcagaaaaacaccaaaggaccatttcattttgtgtattgctgtggtctgattggggtaatgggtgctgtgggatgggagantgcttgtgggttcacacccatgctctccccatggagaaggggccattggttttcttgctttctaccatgtcttggcttgcttttggaacaggctggcctancatcatctgtcctcatctgtggtgtactgtgagtctgtgatccatctccagcacatgcctgctgtccactatttccatcattgaatcacaagacagggctggtgttagacaaccaataataacatattgtttgaaactttggcatcttggtacattttcctcttcctttcctaaaaaataaattaat

SEQ ID NO: 2788 - DNA, 211 bp, Homo sapiens
  misc_feature (1)...(211): n = A,T,C or G
actgaccgttggaaggagagttggggntcttcncagatgtgnaccctgaaaggctacccgtgctcctgtcaccagagcacaggaaattgggaggagaatgtggngcaggggatagaggagttggaatanagaaaggagaaaatgaagacgngaccttgttccaataagacttcatttacaaattaaaactgnntgacccatgataaaaaaa

SEQ ID NO: 2789 - DNA, 296 bp, Homo sapiens
  misc_feature (1)...(296): n = A,T,C or G
cactgagtgcatactgggtgtggtgctgaaccccgggagtcctgaactaaacagaatatacactgcccttcaaagcctggaggtccaggggaggagagatagccnancctnnanaaggcccannanntggnggtgacgaagttgattnggaggcnaancntgcctctgacactctgctcatatgncctcctgccgnattcccaagtcnntctntatccntatgcggncaagagagatccccgtccgatgactcctngtgtnccatggnggggacactgcccaatgagagggtccag

SEQ ID NO: 2790 - DNA, 222 bp, Homo sapiens
  misc_feature (1)...(222): n = A,T,C or G
ttcgaacatatcctttcaagcaccantatgattctggattatntngcnnctgtactttnaaagtggcgggancagaggttngaaattaaagcnttattaagtacattgaaccttgganangcctgnacnacctgngaggccactccttgaaannctgtnccantgnccctgtcccaccgccaaaaaaatacacccacaataaaaacctgaaccaaaaaaaaa

SEQ ID NO: 2791 - DNA, 248 bp, Homo sapiens
  misc_feature (1)...(248): n = A,T,C or G
ctctttctggccgcagngttgnccgcgttggtgaccgggagagagtctggagcggttttggagaggtttggcggcatcancnagcnnccctgaccctcccactggatccacaaaccagctgctacccacgggaggtgatcgngctcagggggtccaggacttggaagggacagatctgaaccttttcaaagttgctttctcctccaagccacaaggcctggccaccccaagcaaagaaaggaatggga

SEQ ID NO: 2792 - DNA, 208 bp, Homo sapiens
ctgaggctaaaatgaaatggtggttctaagtcctcgactctgagagaaggagaatggaagtcaacaactgcccatcaagggttgattccccacagaggggaatgggatggccaagtctcacctgcatgtacccaagaatctgtggcacacggtaaagagagctgccatttctctgccacgagaagcagtgacaatggaaaaaaaaaaa

SEQ ID NO: 2793 - DNA, 121 bp, Homo sapiens
  misc_feature (1)...(121): n = A,T,C or G
aaagaagagtgtgaaacaagaagcaaagatcgggttggaagagggcaaagaggaaagggggggatggaaggaaaccntgcagccaccaacacaataaactgtatcctgaccaaaaaaaaaa

SEQ ID NO: 2794 - DNA, 155 bp, Homo sapiens
  misc_feature (1)...(155): n = A,T,C or G
ctgaggcggagtcaggatcgagtgtctgtcnccccaccgccttcaccccaacttcgantttggccaccaactgnanacacctnaaccccggtatctggctgagggcactgactgggatctcantgtggacgccggcttgagtcctgccttctgtg

SEQ ID NO: 2795 - DNA, 150 bp, Homo sapiens
  misc_feature (1)...(150): n = A,T,C or G
aatgtttacccttgcggaagttgcttacttaatgacattcagccaacttaccgaatcctgaagccatggtgggacgtgtttatggattacctggnagtcgttatgctgatggtagccatctttgcagggaccatgcaacttaccaaagat

SEQ ID NO: 2796 - DNA, 304 bp, Homo sapiens
  misc_feature (1)...(304): n = A,T,C or G
tgccggaaccgaacgnngcncctctcgnanagnagnaagngctcanctggtgnntnatctctncanccgacanaggcttntccctgctgntnctgttaganacccgtaactgctcaacatgcacacagtaagctaccatggaggacctccctgcccctgtgtggtcaccaggagcagaggacctgccatatccttctcagtcttgggagtggctgctgggacagtgggtcccatcccacctggcttgtttcacctggcctctgaaactccaattttctaaagaccaaacccaacaaaacacaaa

SEQ ID NO: 2797 - DNA, 107 bp, Homo sapiens
tccaggagcgtaatgtccaggtgttcctcatctctggtggctttcggagcatttgtggacaccgtgctgcaaagcttcaatatccccaacaacccaatgtgtttgct

SEQ ID NO: 2798 - DNA, 238 bp, Homo sapiens
cgaacctctctggatacatcgtcaccggtaaacccagaggtgggcctcctaggcccaaatccagtcaactggacaatgaagatcacccatcacatatatatttggacttattccgactattcctgtgttgtcttttgcactactttcttggtttatttctttattgatttgtctgctccattgaatccttttctctgagttttgtgttgtattacaagttctgtgccaaaaaaaaaaa

SEQ ID NO: 2799 - DNA, 184 bp, Homo sapiens
ctaagtaatggtcaagactgaggggacgtggaacacctgcacaaactggatttttgccctatcacgactctgaggtaccatccggcaactgaagtgtcctctttccaatagaatgcctggcctctcccaccaacttcacggttcagccggaatgaaatttggctaacaagtcaaaagaaaaaaa

SEQ ID NO: 2800 - DNA, 144 bp, Homo sapiens
  misc_feature (1)...(144): n = A,T,C or G
gatctgctcttggaagagtcgaatgttcaagccagtgtcaacgccagtaacagtgtgtggtgacatacacggacaggtaaatttcacaacgaagttttaggacttgtnctatcagtgatccacttgcttccaacttgtgctgca

SEQ ID NO: 2801 - DNA, 325 bp, Homo sapiens
  misc_feature (1)...(325): n = A,T,C or G
ttaccttgaacattggncattaatgctcnttgtgactcatctcaaaagaagaactttttgcgcaggtcngactcttctccagccagagggaagaatagcatctcccgagcatcctgctttgtgttctgctgcctttgaagtcagttgggtggcttttcatcantggaagtgaggaaggaggaattcatcccatcacatcancacactttagtgaagcctttctgaaaacctgtctttctccactggtagacttggattgggagaagattgctttcaacgggtctgcctttggaaatcatcgtcttctccctaacctgagaaagca

SEQ ID NO: 2802 - DNA, 154 bp, Homo sapiens
  misc_feature (1)...(154): n = A,T,C or G
acagcatgacctgcgctcctccatnataggttatataccnagagctcacttctactacctgaaanctgantttggtctcaaaatctcagatgttgcctcactgattaaagcaatcagtggcctgaaggtcactgcggtcggtgaaaaaaaaaaa

SEQ ID NO: 2803 - DNA, 256 bp, Homo sapiens
  misc_feature (1)...(256): n = A,T,C or G
agactgattccccagcttttcggctgacctgagcaganagagaggaaggncgtcagccttcacagccatggccatcagcatcagcaacaccatccatcctactgccatcacttcaagatctcattcaaccccaggggagctctgagggaatcaaggccctgctctccagatggaaaaatccgggatttcaagggactcaggctgggtgggttagtgacgtcatagataaaccagcactagaccatgaaaaaaaaaa

SEQ ID NO: 2804 - DNA, 130 bp, Homo sapiens
  misc_feature (1)...(130): n = A,T,C or G
gactgaggtgggcaccctgcagattcctggcttgnttgtactctnctccgaccgacgcgaccggagaaagagaaccccgcagtgcanctgnntngatactgaatatcgatacgcgacattttgaaatata

SEQ ID NO: 2805 - DNA, 356 bp, Homo sapiens
  misc_feature (1)...(356): n = A,T,C or G
caactgagactgaccagcacagagaaagtagctacctacgacagaaaacctttccggaagaagttaactaagatcggcccgcctgctccggagacctcattcgttccgctgagttccaaacccggaggaagccccaagtcaggacngccacggncacacacaagaaacccaccaattccatgccggntaagtggcactgcgcctgcgcangaaggcaggctgngggtggactcgggctccctgcgggaaaacggaaccggctgaaactgcgttccgtgggtcanagtgcggcggcggctggagaccaagattcgtggtctagcgnggaaacttncacccatactgccccgtctcct

SEQ ID NO: 2806 - DNA, 164 bp, Homo sapiens
  misc_feature (1)...(164): n = A,T,C or G
atctatgaggcatgactcatgtctcaatcanatctgcttacccccagttctccatggaattagatggcgctgtcactacgattaagcctgnncctnnnatttgnaatgatcactatgcttnaagatntccatgtcaacaagatctccatgtcaagatccaagtc

SEQ ID NO: 2807 - DNA, 166 bp, Homo sapiens
  misc_feature (1)...(166): n = A,T,C or G
gactgagagaatggcattccctgtggatttgctggataactgcacgcatgatatttgcctttcaagcttcattcaatnccactccagccatactgtaactactttatggtaacaaaatgagctctcttttgcagacttagggaaatgattaggaaaataaaaacaa

SEQ ID NO: 2808 - DNA, 426 bp, Homo sapiens
  misc_feature (1)...(426): n = A,T,C or G
agaactgaggttatgaganagaacagatgatgtttnagagaaaancctcgctgggcagantcaggaggnnagtgagaaccatcttcatcaaccaagcctcagctgacaaaattctgcaacaaccacgtcagtactgcaaaatacaaccgngatcacattccttccgagggtcctctattctcagttcccaaagagcggctaattcgntctttctctttattgccctgctccagcaaattcctgatgtgtcgcccgacccggtcgttacacaacactgggtcctctcttatttatttttagctgnggctgctnttaaagaagataantagaagatattnaacgacacaaggctgataatgctgtgaacaagaaacagaccccaggttttgagaaatggggcctggggaaattggtcactggggaaaa

SEQ ID NO: 2809 - DNA, 292 bp, Homo sapiens
  misc_feature (1)...(292): n = A,T,C or G
tcggtacaacagaactgcncgctaagctgccgacgcttacgctcctgttccgaggtgtctcaagaactgagccgacgggacgggacgggacgggacctccacagccaagactcactggcctcacagaaggtctactgacattgacttcattggtacgacctcatcactaacaaacactattgtccttgaaattaaaatcagcgtcagcagctctgatctncgttttcanacanaagagaaatctgtttttcagttaaaatttgtncaaaagtcacaccctgaagttttcttt

SEQ ID NO: 2810 - DNA, 293 bp, Homo sapiens
  misc_feature (1)...(293): n = A,T,C or G
acttgtatgtaaagtctcccctcacgtggccggttctggagaaaagcccataacgttcttgtgtactgtgtaacttgatggtacgtgtttgttagctccgaggcaccacttgttcaattgcactgccctaagttttggtccacatgggttgctaaaagtaatgagatgctatataggagcactaagtgtatttcctgtggcccactgcattatgggtcaggatccctctcgggggaaatgttctgcaaggcaatgttaatgntggcatgaatggaaaacaggatttacgtgtc

SEQ ID NO: 2811 - DNA, 400 bp, Homo sapiens
  misc_feature (1)...(400): n = A,T,C or G
actgaggtggtggacccagantgagtatattcccaatacatctcgggaggccagaatgaagcagggtcccaagaaatccaagatagtcttcagaggaatcgggcctccaagcgggtgccaaaggaaaaaggaggagagtggtgtcctggaaattctaacttcacctaaggagtccacatttgcagcctgggcaaggattgccatgagagcagctcagtcaatgtctaagaatcgatgtcctcttccgtctaatgtggaggcctttctgccacaagccactggatccagatggtgtgttgtccatggcaggcagctccctgcagataagaaaggttgggttcgcctgcaatttcttgctggacagacctgggttccagacactccccaaaggatgaatttt

SEQ ID NO: 2812 - DNA, 395 bp, Homo sapiens
  misc_feature (1)...(395): n = A,T,C or G
acactgagacaacataatgctgntggatactcggctnnaccctnatgcttacncctngtgaananatggnttctgctacctggatcccaaacccagtgcancanaggcaagaactgttgccacttgctgaancaagatggaantatttgtggacatggctgagcttcgactctnacttnagtgaccgcgccttcgctgctgttgaaggagcactgggaagtactcaagggagtagtgaaggctagacttcctaagtaaaacaagctgaaaacgacaactacctgccatctaagaagaaagcctgctggccctcactcttgactcagctcctgtttccagtcagcatggagggatcnaggtgggaggtggggtgatggtgtctgctctgttctaaa

SEQ ID NO: 2813 - DNA, 118 bp, Homo sapiens
tccagggatccagcaccatcttctggcctccacaggcaccgggcacacacgggtacacatgacattcttacaaccggaatacccatacatgtaaaatacaatttctaaaattaaagat

SEQ ID NO: 2814 - DNA, 260 bp, Homo sapiens
  misc_feature (1)...(260): n = A,T,C or G
ctgagaaagcggtggagaaagaactggatgctcttttggaacagcagaacaccattgaaagtaagatggtcactctccacaggatggggtgagtatgtaccacagcaaaagttgtacattccagtaggaccacaggataaagttagttttcctagccccatagtccagtctcttgggaagctaaggtgggaagcttgctgcaaagttcgaggccagccttggttatagagcaaggnactgtcacaagaaaggaaaaaaaa

SEQ ID NO: 2815 - DNA, 326 bp, Homo sapiens
  misc_feature (1)...(326): n = A,T,C or G
actgagcctttgaccttcagttctgngttnggccaggtattnnnntgtctctganngtgncccaccanagaanagagntnnntaacnnntgccttcctgangtataaaangnnccaaaagctggattttgggcaaggggncctntgggacctaaaacacattgtaggcatcctgtgcagctacagccagcaggggctggaacctgtagcacctgagtaaggcaaatggacaacggaggagccgcagcaggtcacaccaggaaccgacgaggtctgtttgaattccccctgggaaataaaacatccagtcaacttcaaaaaaaaaaa

SEQ ID NO: 2816 - DNA, 387 bp, Homo sapiens
  misc_feature (1)...(387): n = A,T,C or G
attgcggcttatgacaaacncgtacctaaagnaaagtgatgacaatgatgcangacctatatgatcngcntggacgantgccngggnaatctttgatgcantttcttaaanggtnacacnttnntcnttggcttcgatgaggctgagcttctggcaaagcttgaggaattggagcaggangaattaaataagaagatgacaagcctggagcttccaaatgtgccgtcctngtncctcccagcacagcccagtaggaaagccagcatgccctcctccgtgcaccggtctngaacangcatcttccaggagggcacaggaagatgatgactncanacaactagcacttgggccctttaaaagctacantgggaaacacttgacacctaa

SEQ ID NO: 2817 - DNA, 542 bp, Homo sapiens
  misc_feature (1)...(542): n = A,T,C or G
tgagataaacgtgtagcatactggccgctgatgcagtctccatggccaacgataagcataagcacgctctatctcctgttcgtgtggctgggtccaaagtggatgaaagaccgcgagccgttccaaatgcgcttagtactcataatctataattttggcatggttttgcttaaccttttcatcttcagagagctattcatgggatcatacaacgcaggatacagctatatttgccagtcagtggattattctaatgatgttaatgaagtcaggatagctggcgccctgtggtggtattttgtatcgaaaggcgttgagtatttggacacagtgttttttatcctgaggaagaaaaacaaccaagtctccttccttcacgtgtaccaccactgcaccatgttcactctgtggtggattggaatcaagtgggtggctggaggccaagcgtttttccggggcccagatgaactctttcatccatgtgatcatgtactcctactatgggctgactgcgttccggnccctggatccaaaaatatctt

SEQ ID NO: 2818 - DNA, 293 bp, Homo sapiens
  misc_feature (1)...(293): n = A,T,C or G
attggtacgactccatngagaatgcaagaccctnnccctgcngtgcagttctcaaacttaccccggattgacttcagtagcatagctgtgcctggcacgtcaaacccccaacagcgccagctgcccagaacccaggctcagcactcatctcctggggaaatggcatcttctcctcaaggcctagacaacccagccctgctccgagacatgctgctggccaacccgcatgagttgtccttgctgaaggagcgcaacccacccttggcggaagcttctgctcaattggaaaatcg

SEQ ID NO: 2819 - DNA, 397 bp, Homo sapiens
  misc_feature (1)...(397): n = A,T,C or G
gaactgagagctttcctgggcaccgcctccctgctccnaacaccacctgngatnccaaagcaacantcttacctccctgggtgattgagncaccctgcangcagcatgtgctgctgatganagctcgggatngcnatcatgaatggtcttggattccaaacctgccntgtgtcanctgngtatcaccgacnacgacaacacaaaangtttctgncttgcttttgtcatctgtaagatgacgttcacaacagcacagtcccagcgctaccacggccccaacagagtcagctgtactcaagacagaggaagacgccatgatgtcaactgtactgatggatacctaggaatctaagatgagggctggggagatggctcangtggcaaagtcttgcaaaca

SEQ ID NO: 2820 - DNA, 140 bp, Homo sapiens
  misc_feature (1)...(140): n = A,T,C or G
caaactcgggagtgttgaggctttgcgtgaatgtctgagatangggcctggctccaccccaggaagggaggccaacgtcactaacactgtatgtgcaaatgtccgcaataaaacactttccaactttgtaaaaaaaaaaa

SEQ ID NO: 2821 - DNA, 111 bp, Homo sapiens
cagagcctgctaggcctcttccctcccaaaacagccaaccccaaaagaaggaaggacgattcagcatgctcaaccaaatcttctgcaaaaataagaagaaaagcaaaaaaa

SEQ ID NO: 2822 - DNA, 107 bp, Homo sapiens
  misc_feature (1)...(107): n = A,T,C or G
ccctggggtgttggaaccgatcatgtgaacncangggtggattnaagccctggtaagcgggtttgagggatgactcagganccaggagaactatttgtggggagatt

SEQ ID NO: 2823 - DNA, 184 bp, Homo sapiens
aatggacacagttttgtgcatatggaacatgaaaaggctgttttactactgaagagcttccagaacacagtagacctagttattcaacagtgagctcactgtctaaatgttttttataaatagtgaagatatgtcaggccagaactaatgtttaaaaataaatttatacatagaaacaaaaaaa

SEQ ID NO: 2824 - DNA, 162 bp, Homo sapiens
  misc_feature (1)...(162): n = A,T,C or G
gactgaggtttctgaacttgttcatggctggatttttaaaaaatatattcaagatttcctgttaccgaaatgtaagtgagaagataaaaacctctattggttcattccattttattctattggnggattaaagtattgaatttttagtgattaaaaaaaaaa

SEQ ID NO: 2825 - DNA, 243 bp, Homo sapiens
aagtggatccacacctacactactgtgtaggctgacacctggatggatggtatatgaatgctatgaatcagagtcacctagctaggccaatcccagaaccccgaccgtctaaaaccacagatgtttgttttgtcttgagactgtgtaactcaatttgtgaattggtgcttagttcccttgccccttgagcctcacacaggctcgaacttaatgcatgcagcagcatgcctgatatactcatta

SEQ ID NO: 2826 - DNA, 145 bp, Homo sapiens
ctgggttggaaattgaacacaatacttggctgtaccttcagccctagacccggcttcagactccggctccgcgattcatcagccttgtgaccttgcacaaatcatttgcctttatgaaataagtctcacatctgaaaaaaaaaaa

SEQ ID NO: 2827 - DNA, 199 bp, Homo sapiens
  misc_feature (1)...(199): n = A,T,C or G
tgacaactgagatatggaganctgacanntggggacattgggggncacgcngagctacggatacaatagtaatgtattcnttcaagcctttcancagaaaacaccgnggntggctgtgcanngctgnctctgntctgaatcgaanggataatggctacttcctgattaaagccggtccaccgtaagcagaaaaaaaaaa

SEQ ID NO: 2828 - DNA, 237 bp, Homo sapiens
  misc_feature (1)...(237): n = A,T,C or G
ggggattgcactggatcacttttggggatatcatcactggactggtttgacccactggctgccaagtggactgctgctgctgctgatacatgctggtgttgttctagtggactgctgctgctgctgatacatgctggngttgttctagnggactggattgctgacgatgaanattggaataaccccaaagaactatttataaacaggtntacaacctgtttcctattaaaaaaaaaa

SEQ ID NO: 2829 - DNA, 440 bp, Homo sapiens
  misc_feature (1)...(440): n = A,T,C or G
gactgagatgaagacatgcatttctggtgtccctcactgcaggaggtcaaagaggtgttcaagcaagcctgggagcctacaaccccgccctgtacccacaggggcccttccagcacagcgcaagggtgcttgagagtgaggccagcctggattcacaggatcctccccaggaagtggccttggacattaagttgaactacatctacaagttcctgaccctgtgtctcctantccggccagtgtcctacacggatgccagcatcttggatctgatggagctgctgtgccgcgcaangcctggatgtaaggttgtgcctgctgcccaanactgacctccagcaactnctgctcctgntgctggagagaatccaacaatggcctggaaaagcttcancccttttnttgggccttaacttggggggtgcgaccaccaccacaac

SEQ ID NO: 2830 - DNA, 237 bp, Homo sapiens
  misc_feature (1)...(237): n = A,T,C or G
ctgtagctggtcattacatctcccctttcccgacattcctctgaaggcggactgtaaagaggaacatgaaattcttgagccattccatccagtgcgttgaanttttnaaaaggcttgttcctgttcctcttcaccacaacctgaatattttctgagttttatgggattttctgtgacagtgaagtttangttaagatgttaacactgttattaaaatagctattacacaaaaaaaaa

SEQ ID NO: 2831 - DNA, 189 bp, Homo sapiens
  misc_feature (1)...(189): n = A,T,C or G
gactgagacaacacctgaggtgaaaactanacccagaagngcgggcgtgcgcgtctcgaagtcagccataacaagcatctggcttgtatttggggaggggacgattctcgattcttcgttcaactctttggagctcccctctcaagcaaaataaaccaataggaatgagngtttatttaaaaaaaaaaa

SEQ ID NO: 2832 - DNA, 348 bp, Homo sapiens
  misc_feature (1)...(348): n = A,T,C or G
gcccatttaagacactngtgagccctggtgaaatcgaccgaacnctaganatgttgacatccaaagaacactgacgccngaacaaagganaanagtgcctgcgatctttnaacctgtgtgacgccaaaattccgacncgtccaccggcctgtgaagtgcgcttgcgcgaactgggctacccantaaaactgngttggaccannggntcanaggntaaaannantgactactctttgcgaanggctgagttcagatcccngcaancacatggnggcttnnancattcgnaacganaacctttacnctnttctnaggngnctgggaacagnttcactggacttacctata

SEQ ID NO: 2833 - DNA, 263 bp, Homo sapiens
  misc_feature (1)...(263): n = A,T,C or G
cagactgagaattttcnatttgtccctgaacgaacgctgcctttctgcatcgttggtttgcaagtactggcgtgacctttgcttagatttccagttttggaagcagctggaccttagtagtcgtcagcaggttactgatgaattattggaaaaaattgcctccagaagtcagaatataattgagattaacatttctgattggngaaanntgacnaacagnggngggggtgtgctaacatggaaaagtcctggacttcttaagt

SEQ ID NO: 2834 - DNA, 251 bp, Homo sapiens
  misc_feature (1)...(251): n = A,T,C or G
ttgaaacactgaggtggaatganccttacttgttgactggntgctgatnggattcacttgaaaactaacctnananaacctgnnngagnggaccagggctttgnctcaagnagcagacggncncctgtcactccttcctcagcttctcgataccnccgccgaaggtcctcanggnctcgagatgaacgntatcggtcagatgttcatacagaagctggccaggcagctcttgctaaacacaaagaaaaaaa

SEQ ID NO: 2835 - DNA, 326 bp, Homo sapiens
  misc_feature (1)...(326): n = A,T,C or G
atttggctggcctgaaatttgctgctgtagaccaagtnggcttcgtattaagagtaagagacctttctacttctgtctatggagtgctgggattaaagaaganctgaccntacacantaaccagncngagaaaagcctnaaacaagngagggtaaagcagtctancccacggctgnanaananagctnagangtcaaaagcacctgctgatcttncanatgaccagagtccagttcccagcatccanatcaggcttcttatancaggctgtancttcaactatggagggaanccancatcatgttttggcctccacaggcatgcac

SEQ ID NO: 2836 - DNA, 485 bp, Homo sapiens
  misc_feature (1)...(485): n = A,T,C or G
tcctgctacctatatccctgctgcngtaccngaggtagcttntggaggagctgcagangtagtccagtgtgctaccgaactgagcttcacagaactgggccttggttcttacaccccggtgggtctcatccagaacctcttggaatatattcatgtcgacctgggcctgccgtggtggggagccattgccacagtgtantaggacntcctgggnnngggtggaaganttggggacaaaagngcagaggtnagaaaaccaggtgattcannangggatggtaacattcaacttttatttcctagagagtgttagaaagccacttatctgcccgcagtgcttgggaggtanaggaaggagggtcancgtncacccttaagtaattaaagaattcaaggctagcctcataccttaancactgntctgggggccatgaanacatgccatgatcnaagcantcctataaatnaaggaaagcctatttact

SEQ ID NO: 2837 - DNA, 368 bp, Homo sapiens
  misc_feature (1)...(368): n = A,T,C or G
tgagtgaccttccagatgcaaaatcgagagcccttgacaatattggcagagtttttgccagagttgggaaattccagcaagccattgacacgtgggaggagaagatccctctagccaaaaccaccctggagaagacctggctcttccacgagattggccgctgttacttggagctggaccaggcgtggcaggcccagagttatggggaaaagtctcagcagtacgctgaggaggaaggggacctcgagtggcagctgaacgccagtgtcctggtggcgcaggcccaaggnaaggtggggnnctnanactcccannccnaangnntnnacanagcnnnnntgagannccattnttaccataacttggag

SEQ ID NO: 2838 - DNA, 309 bp, Homo sapiens
  misc_feature (1)...(309): n = A,T,C or G
gcttgccttcaaagatgctgctgcaaaattgaagaggaccattgaacaccttaaaaaaggcaaagccnngcttcaantcnntnnnntgcanacatgnangaaantaaactggctagnctagctggccaacctttgtcaccacctcaacagctctagcatttaagtgttaatttctcccagcaacaggacacaaaagtaattgagaatggccatgaacttctcatcctcctgccttcaacttccaggtgatacggattctaggngtgcntcacaccctctggctaataaatgagtttcctttaatttaaa

SEQ ID NO: 2839 - DNA, 115 bp, Homo sapiens
  misc_feature (1)...(115): n = A,T,C or G
ccatctggaccgtacgagaaggagacagcagagaggncaccagacatccccaacaggggcagctnccaggcagagagcccggctgtgantgccangnngcatgccatcgctgcca

SEQ ID NO: 2840 - DNA, 132 bp, Homo sapiens
cctgaggttgatcgtgtcctgagctgaagatgttcccagaacacgcagaaagaggtaacgatgctacccattcgtttatggagagtctgggctgaaaatctgaaaataaataataatccacagaaaaaaaaa

SEQ ID NO: 2841 - DNA, 135 bp, Homo sapiens
  misc_feature (1)...(135): n = A,T,C or G
agctgcaaacaagcgganggactgtgcanggggccgaggtcgntctttctcctgcctttgcanctcagggcttttcttctgtctctgtgggaatgtttgaatttccaattaaaattggctttattaaaaaaaaaa

SEQ ID NO: 2842 - DNA, 178 bp, Homo sapiens
tctagtgttccagaaccgccagacaatgaaagaaaagcaagtttatcatgtttccaaaatcaaagagcaatacaggaatatattgatttatcatctgatactgaagatgtttctccaaattgttccagtacagttcaagagaaaaaattcagcaaagacacagtgattatagtgtaag

SEQ ID NO: 2843 - DNA, 260 bp, Homo sapiens
  misc_feature (1)...(260): n = A,T,C or G
gaagagaggaaacatngctcacgggcttcatctgnccaactntagaagnttattttcatcatccatccattggtgccatacancttccaaggctgtgaactgccttggcaccaacatgaagatcatttgggtaagactgtgnagaggactgattatntnttaattgaggtaagaatagatgaccaaaaataccctatcaaccatttaaatgtacatctcaggagcattaattatgttcattttgctgtacaaaaaaaaaa

SEQ ID NO: 2844 - DNA, 176 bp, Homo sapiens
  misc_feature (1)...(176): n = A,T,C or G
cttctgggacctgtattgtgcggcaccanaccgcanggaggcctgtgaacactccagtgaggccaaagtcttccaggactatgtgagtctccaggattctggaacctggaccgcttctttttgctttgtttgtatgttttgagactggntctttgnggccttggatgtcccaggaa

SEQ ID NO: 2845 - DNA, 247 bp, Homo sapiens
ttgacaccactgaggcagacatgttggctatttggcgatgagaagtttgaagaactgacatcatactggtttagaacactatgggacctgacatttgcgctgcttgggcagccagtgcccattggtactgctaagaagccctcactctactgcagaacactaatctgatcttggaagtggctgattgtggcaggatgtttcgaagatgatgatggcaagaaagcaagatgtccgcataaaaaaaaaa

SEQ ID NO: 2846 - DNA, 493 bp, Homo sapiens
  misc_feature (1)...(493): n = A,T,C or G
atcaccctcagtgtccttgtgattgccttgctcacttgctgtgtgactgcttatcccaatggcaaagtaccaatgtcctgtggtgggatgatcccccaacataaccacagcccacagtctgagcctattcaccaaatcacagtgagtcagacgacgttcaaacctggagaccagatcgaagttactttatcaggaccaccatttagaggctttcttttggaagctcgtgatgctgagaatttgagcggccctcctattggctccttcactctgattgacagcgaagagtcacagcttctgacctgtaccgatgtacagggattagctgtgagtcatacaaggtcatccaagaagacagaaattaaagnctactgggatgctccaagccctgccccagatcacatacgatttctagctacaagttgttcaganattaaaatctacctggggtgaagattccgagtcctcgtcctctgctcactggggcttgatt

SEQ ID NO: 2847 - DNA, 333 bp, Homo sapiens
actgaggctttactgtgaaggccaagctggtatggacttactccgaagcactcgctcagttcaagctcttgcttctcctgcctcagccttaacaagtgctatgctgacaaccagaccctattaccacaagcttgaagaatcaaggaaattaagtacaacagttttcccttacaggaaaacatccaagactcacagcagaggactcctaactataacagcaccaactgctacaaacactgcttttcctatatgttctgcagcatggccacagaggagaggcagcttttacagtcttggccagcctggaactcactatgtaaatcaggctggtct

SEQ ID NO: 2848 - DNA, 325 bp, Homo sapiens
  misc_feature (1)...(325): n = A,T,C or G
gattcacatctgaatgcgctgcngggatccaggaatatctngctaggatgtaacaaagctaaaaatcccgccagaaccaaacactggccacagcttaacctgcatccaggtcggagacacaaggactggaaactggcttcactcgatacactggcctanctccagggtcttcatggattcctccagcttcagcactcctgcgtgagaaacaccaaacaggattaagtgtcatggaacaggaggaaggccgcatgattcaccagctctttaagcatgtttttgtggacctctaattagaaccagggctccactggaaaaaaaaaaa

SEQ ID NO: 2849 - DNA, 220 bp, Homo sapiens
  misc_feature (1)...(220): n = A,T,C or G
gttggatctcctggaaacatgaatcacagaaaggtgtgagctgccattcgggtcccaggaactacagccaggtcctctgaaagagcagccagngctcttaaccccaaccatctntncagcctgagaagtgcgtgttcttatcatgagaagacaaacaagcaagtggagttgcaaagctgcctcaantgggtaaaggnacttgctgccaaggcttgcaagc

SEQ ID NO: 2850 - DNA, 199 bp, Homo sapiens
aactgagatgtgcaacggaggaagagcccagtgtgtggtttcgtagacccctctgcaggggtctgaagcagatgagcaccggaaacctgaggctgtcatcctggagggtaattactggaagcggcgcatcgaggtggtgatgcgcgaataccacaagtggagaatctactacaaaaagcggctccgtaagtccagcagg

SEQ ID NO: 2851 - DNA, 271 bp, Homo sapiens
ccccatcacagcttccttctgccaaacctataaatctaactgatgaatccatgtttcccattggaacatatttgttgtatgaatgtctcccaggatatatcaagaggcagttctctatcacctgcaaacaagactcaacctggacgagtgctgaagataagtgtatacgaaaacaatgtaaaactccttcagatcctgagaatggcttggtacatgtacacacaggcattcagtttggatcccgtattaattatacttgtaatcaagggtg

SEQ ID NO: 2852 - DNA, 247 bp, Homo sapiens
  misc_feature (1)...(247): n = A,T,C or G
ttactaatgacgccccagtctgnacttgnacttaccacactcntactgcancctacngaatgctgggantgnaagnccctggccctgnctttgtctgctttttgttgactgagttgacttaggcgtttactccacagcagaagtgtggagattggggacaataagtggaaggcccctaagatggagctcagcttgtcagacttggcagccatcactttggcctgctgaaccatctcaccagccactt

SEQ ID NO: 2853 - DNA, 203 bp, Homo sapiens
  misc_feature (1)...(203): n = A,T,C or G
ctccgatggaccaacgtggncannatggatctgtccaanaaggncaaactgntgnncattgcagggaccctccncntacttgctgnaacctgaggnanggctggntatntngtggtacgccgtcaacatcactactgacttcttcaacccactgtatgctggaaccaagtatgaactgggccccgccctctacttgggctgga

SEQ ID NO: 2854 - DNA, 283 bp, Homo sapiens
  misc_feature (1)...(283): n = A,T,C or G
acataagacatctgggctcgcgngctaactgnnagcacgcaaaacgccnctgacagattgcattcgctgtaggaaactcgtccggcgtgcagctgaggaaagaaacaccttcgaaagaaggatatctccaaagaccaggctcccgcggcctgagtcgcagacagtgatgccaggagggaggcaaaggaacttggaagcagcggatcccgacacaggcgcggcaccgggagcagccccatcattacccagcggctccttcaccagctccttctcgaagaaaacg

SEQ ID NO: 2855 - DNA, 157 bp, Homo sapiens
  misc_feature (1)...(157): n = A,T,C or G
atcccatctttgtgccccacacanagcncanttttgaggccagnttnccccaagctgnggatgggtgtggcatgcctgacaatcaaagggcaagggnctgangggancctataaagngacttgggagaanccacacacctgacttggaggattctgg

SEQ ID NO: 2856 - DNA, 171 bp, Homo sapiens
  misc_feature (1)...(171): n = A,T,C or G
gactgagacctctccagcatcaaccaaacccgactcgagntncacttctntggtaaaatggccatgcggcanggaggnccngcntacccgcttnatgtnnttccnacanctccnccacnatgccacccagaccatnaatataagagatattgtgcttggaccatatgacac

SEQ ID NO: 2857 - DNA, 202 bp, Homo sapiens
  misc_feature (1)...(202): n = A,T,C or G
ataacgaaaactgtggttgagaatatttgcnngaaagatagngntgaatnatgtnaccnngacctggctccatncntagacactggcactactgnngaggaccgcctgaagatngatgtgatcgactggctcgtagtttgacccggccaagatagcaggaagccctgaggcgaangcancgccatcatgaggaagttcttac

SEQ ID NO: 2858 - DNA, 249 bp, Homo sapiens
  misc_feature (1)...(249): n = A,T,C or G
agactaagctggattcctgactgacccaggaggctgcatgcatgctgtctagagcctcgctcagnacagtgctggcctcatccccacaccagccatcgtcactctaatgtntcctccttccagaaccacagnnttntcatctaggcaagaatgngacaacactcagcctcgngaaaatctntgggtgcttatggacctgtcacacaaangggaatgagtgntgnttgatagtacttgtatctcaacaat

SEQ ID NO: 2859 - DNA, 101 bp, Homo sapiens
  misc_feature (1)...(101): n = A,T,C or G
tcaactcctgctacacagtccttctattacctctgagctaaaggataccttgnttcacaaataaaaaggatagccaaggaaggcaaatataaaataaaaaa

SEQ ID NO: 2860 - DNA, 262 bp, Homo sapiens
  misc_feature (1)...(262): n = A,T,C or G
gactgagggtgctgaacagtccaaaatgatccaggtgtatgcagttcaaatccttgccccagtgagggaatccctagggaagtgggtgatgggactagagtagatccacttcctccagttcatncgcnctntaaanaaatcacggagnccnaggcacaanaagagnnagctagcngcttgcttaaatatttcagcgatgttaggcgtntatcttcacaagacccaccgnaaggaaangagcnggctttgttttcatgatgat

SEQ ID NO: 2861 - DNA, 109 bp, Homo sapiens
  misc_feature (1)...(109): n = A,T,C or G
gggactaagccgaccttgaatggattcgactgactactaccaagnggaaccgatcatgctagcctttgnacacaaagaataaaaatgtgaagaactttaaaaaaaaaaa

SEQ ID NO: 2862 - DNA, 176 bp, Homo sapiens
  misc_feature (1)...(176): n = A,T,C or G
acactgattctgcaaagaggcctggactcggaaaccaanaaacagcttnaagaggaggagcggaggatgatcancgacgagcacnttnccntcttgtatgcttgnttgcagngangnacaccttcttccgagnngaacaaagcttcttcctataatgaatcacactgtctctacgg

SEQ ID NO: 2863 - DNA, 108 bp, Homo sapiens
ccatttcactttcaagcagaagatgagcaggattatatacgcgtaagtactttcaaagtggcggtgcagtggtttgaaattaaagcattattaagtacaaaaaaaaaa

SEQ ID NO: 2864 - DNA, 374 bp, Homo sapiens
  misc_feature (1)...(374): n = A,T,C or G
aggatgaccttgaactcctgatcttcgtgccctcacacctncaagagatagaatnacagatgtgggcaaccaagcccggctttgtatacctgaattggtcgggcgtgatccgtctcggttgggttcgggcgccctctgctgcctattgngacncggnccaccaagttacccaggcggtggaggtcggggcggagctctggagccatgactgagccgcaggagcagctgctgcaagctgcagaaggacaaccgagatgggccgcctgcggaagcaggagctagaagagctggtgcgtgggctggaagccgagagccgaagagcctcaccgggccgcctggaggagctgcgggaagccgcgaagcgcagccttgca

SEQ ID NO: 2865 - DNA, 307 bp, Homo sapiens
  misc_feature (1)...(307): n = A,T,C or G
agactgagacaaggagactgacnngattgcatcntacccatatanntanactggctgaccggggagtttcaagcatctgcctgcctttgcgcactcaaaagaatgccatcacccttggattttgggaatcaaaccaaggacatcatgcttgcaaggtgaaaattccttctgntggtttccagagacacctgggaagactctggggagcccttggctaataatctcaggaaaactgctgccccggctgaaactggaagctcatggtggacccaagatctcttatctctgggacacttaaaaaaaaaaa

SEQ ID NO: 2866 - DNA, 111 bp, Homo sapiens
  misc_feature (1)...(111): n = A,T,C or G
aaccccggttgaaaccctgnganatcgaacatattantttcaagcagaagatgagcaggnantatatagcgtaagtactttcaaagagcncnggagccagtaggtttgaaa

SEQ ID NO: 2867 - DNA, 267 bp, Homo sapiens
  misc_feature (1)...(267): n = A,T,C or G
atttcaaaagatccctaatgttgaaaatgagacaatgatccctgtactgacgtcaaagagagcaagtgagttancagtcagtgaggttgcaggccttttccaggctgatcttcagaatggnttaaacaaatctgaanttagtcataggcaagccttccatggctggaatgaatttgatatcaagtgaanatgaaccattatggaagaagtatatttctcagtttaaaaatccccttatcatgctgctcctggcgtctgcgggcaaaa

SEQ ID NO: 2868 - DNA, 290 bp, Homo sapiens
  misc_feature (1)...(290): n = A,T,C or G
gggaccaatctccgctgcaaatcctgntntgnagactcgactnccacnccagggnacaccgggcgaaactgtacccacctctgggccccgtccagcacctgggcttgccaaggtangggacaacnctttttattgtcaanaccgtnnntananatgggcaaanngggggnccctcctccatagaagcactcattttgcggggtnctgnagaggggccctccccaaaaangtnacgnccccttgggggaaaagacaccctttntntttttttnttgaaaaagggggggcca

SEQ ID NO: 2869 - DNA, 428 bp, Homo sapiens
  misc_feature (1)...(428): n = A,T,C or G
agagaaacccgaagaacacaagacaaaagagactgatggggcacccagtggccctggaccgcggcaacagcctagtgccttatgtgccaagaggaagtaaagaaagccaccagaagcccacagagatcgacgagcaagataaaagagaacaagcacccgtttgctctttatggctggggagagagacagatggacatgggaagccagaaaacacacaacgtctgcgcgtcagcctctgtgcacganattcatgaatcancacttcgagccaagaatagaanacaggtggagaaaaggaagctggctgcccaaaggcagcggncnnacttcggnggccgtggaaaaaaaccagagggtaaagccggcgttntgccgaaaacccatggctgacaaaagtatatgcggngctacttcaagcgagggcgtta

SEQ ID NO: 2870 - DNA, 342 bp, Homo sapiens
  misc_feature (1)...(342): n = A,T,C or G
agggggcgctggcaatccgtcagctggngtcagtcatcttgaaacagnatgnggaaactcactggtgtgcccaatcagganaanttcagacctccggaaactacaagaaagggcaaaaattgtcatccgggagctgttacccaatgggttaaaagaancaataagcnaagggcnctncagtgnggcctatgctgagtccnncattgcccactgggattggnctgaagnctggccccagctcttcaacctgcttatggaaatgntggtnagcgnaagacttaaangctttccatggagcccatgcgtgggttgaccanaagttanctcgagaaggggacagac

SEQ ID NO: 2871 - DNA, 443 bp, Homo sapiens
  misc_feature (1)...(443): n = A,T,C or G
ggcagagaccgggcggaggccgtngcactncgngggganctctnnagtgnttgnacagnatggttggnaaacttaaataacgtaggganaggcgcagcccagaacttccgttttcctgctggtccttccttctgaccagggccaaggctgaaacctggctgnctctgccaggtaatgccactgctgctgattcgtgttgctatccaaactctatanaactggactgctgctgtatctgtaaagtgttggtgagtggattgagctgccactgctggctcttgtaaactgaactgttgatttcctgacagtgccgatnaaatttgctacaaaagaaccatttctnaatagggccactttccctggaatcctttntttcccgctacctttggnaggttaaaggggtttaanaaccatcattaaaaataagactttgaaaaaatatt

SEQ ID NO: 2872 - DNA, 259 bp, Homo sapiens
cttcagtgtgtgccaccggtgggggaggcacgagaagaacggggcactgggatacgatggggaaagatcaagaacgcagcacaccaagtttggaatggacttagcttctaacctgctccctagctactgacatttttttcatctcggggaggagataacagattaggggagtgggaccttggagcaagatcctacccagctaaatttagatccagctgattttcagccccagctaatcagctcctgcttcctgaccttc

SEQ ID NO: 2873 - DNA, 139 bp, Homo sapiens
  misc_feature (1)...(139): n = A,T,C or G
cacttggctactcagngaacattgattcaaccaaatgaactgattcaagggagtgacttttgaaattgcctcctgctaatgnaaccagaaagtacagcatcttggatggagataccaaagatcacaagatctttctttg

SEQ ID NO: 2874 - DNA, 378 bp, Homo sapiens
acacatttaatcaaactaggcaccaaaatgctgccattgcttcctggagagaggaaacctaatgatccttttacccaaagaagaggcactagacagaccagcattgcatcttttgtcacgctacaatcaggaatggcaagtggtggtaaccagaagaacattttctctctcaaagaaaatcagaccaacaaagaatgcaagagaacccagctagactgtttggatgatggcttgctctcgcctttggtcacttcagctccagcagacatccaggaagctgggcatcctcggtctccccagatttcaggctgccagggtttggaaatgtcgtctttgactatgatgtctttgacccagcctggtgtcctgatggatgca

SEQ ID NO: 2875 - DNA, 166 bp, Homo sapiens
gatagggtggttcaccgcggagtgcatcgtgcggttcatcgtctccaaaaacaagtgtgagtttgtcaagagacccctgaacatcattgacttactggcaatcacgccctattacatctctgtgctaatgacagtgtttacaggcgagaactctcaaaaaaaaaaa

SEQ ID NO: 2876 - DNA, 219 bp, Homo sapiens
  misc_feature (1)...(219): n = A,T,C or G
gggagctgggacaaaaacaagtgcatctggaagctggagctggagctggagctggagctgganctggngctggagctggagagaagcacaggaagggcccgaggactacagaccctccgaagacaggctgggcattgactaatcanaggctggtagccttgtcccctacactangccaacgccacctgctttttggcgactttcttgacgacataggca

SEQ ID NO: 2877 - DNA, 302 bp, Homo sapiens
  misc_feature (1)...(302): n = A,T,C or G
actgagtggagctggcctgaactttggaccttgtcttccagtaggaaatcagtctctcagaaggcgatcatggcctccaagcctgagaaaagggtggcctcctctgtcttcatcaccctggcaccgccacgccgagatgtanccgtgagtgaggaagtgggccaggcagcttgtgaagccagacgcgctcggncctgggagatgcttcccacaaagacacctggggctgcagtgggcaggagccccaagacctggacgccctccggcaagaccaatgcctcactctctggagtcacacctca

SEQ ID NO: 2878 - DNA, 209 bp, Homo sapiens
  misc_feature (1)...(209): n = A,T,C or G
aaggaggaatgagaactcattgacgtggtcgataaacnagaacatgaagctgtggacagaaggtgctgattcccgtgaagcagtttcccaaggtgaggcgggagctgnncnntnntgctacngancccacnagcatagcgcaccctggcattantggccctggccttcacacacttgaagctaattaaaacgtttggggaatgaaaaaa

SEQ ID NO: 2879 - DNA, 337 bp, Homo sapiens
actgagatcaatcttcctgctctgactccacctccgaacccctggacacgacccacttagactcctctccaggtcggctctccattcccagagcttgcctggtatgctcaaagatatccacatgttggctaagcaccttctgtcaagaggaggccccgccccccgcaacagtccccgcccctaaccactccctctaccccctggaactatacagtttctagttcctttgcaggtccccggtcccacccatccaaatcctgcctgtccccctcaccatagcacatgaactctgtcacaatataaatgggttcctccgacaccaccgcaaaaaaaaaaa

SEQ ID NO: 2880 - DNA, 275 bp, Homo sapiens
  misc_feature (1)...(275): n = A,T,C or G
acaaccccctctatgtggatnaaaacttcatcnatnncccgctggcccaacctgactgggctgccactgaagtttggtatggccgccttccancaacnaanggctttgaaccatctagctcttggacgttggaggtggnacaanannccnttgtcnagctggtgccataatgngaagactgtgaaggttcnatangacnacattgcatccnatganacccacccatcattctaccnnagggtggnggacatgtgccnagcctcattttgccattc

SEQ ID NO: 2881 - DNA, 244 bp, Homo sapiens
  misc_feature (1)...(244): n = A,T,C or G
ccatgcggaaaaaggcctgggaagactgggacagtgagcctgcctaccagcatgggtggcccttcctgaaggtcaataaagagtgtgaaacgtgagcagagnntgncnatannnancttcngcnntgatnngcnngaganttgggaacatgcacagatgntngggaaatactcataggaaagagagatntgtatgggtaaagagctaaaagaaagaacatcattttagttaaaattaaatcact

SEQ ID NO: 2882 - DNA, 251 bp, Homo sapiens
  misc_feature (1)...(251): n = A,T,C or G
atcaaaactcacctgacgccaaaacacccccaaaanacctaccanccattcctggggtcactanccctaccanctgattancctcccatgcaagccatccannanccaacntgcccaccancccggaagataaacgntcaantcgtattaaaaatcacaattttaaatggacatttaatgnacnccccgtagngacgcaatgatncttctanggcccccaaggcccttggnaaataaaaccttccacacca

SEQ ID NO: 2883 - DNA, 105 bp, Homo sapiens
  misc_feature (1)...(105): n = A,T,C or G
attctactcaagccttctggaaaggactgtgttgcctttgatgcatggancaaagaattcttagatttttctgccaacccctgaaaccggaccttgtgatggcaa

SEQ ID NO: 2884 - DNA, 384 bp, Homo sapiens
  misc_feature (1)...(384): n = A,T,C or G
actgagggtcagtgaaatggctnagctaaacctgagttcaatcccaggacctgcattgtggaaaaagagaaccagcttccacaagctgtcttctgattgctgcagacacacaatcaatcaatcaatcaatacattcaataccattatttgtactattatatttatattggacacaaggttttatgctgactcaggctgaccttgaactcttgattttcctgcttcagcttcccaatgctggaattagaggtgttattagcaccactatgcttggtatgagtacatccttttgatcaatgtttgagaagctcatgttaatctttttccattctgattggagcacagcaggctcatggaccagtgacacccagaaattgagctgcc

SEQ ID NO: 2885 - DNA, 395 bp, Homo sapiens
  misc_feature (1)...(395): n = A,T,C or G
ctcagggacgcagctcactaggaatctacagattaagccgtgggaactcggtgaacacgggaccatgtgctttagatcctacaggatggctctctcctgtttgagcagagtaaaaacttacaggaccccttggaagagattgtacagtacttcacaaacaacagttgacagcagggaggtcaaaaacttccaggccctggctcacaccgtggtgggatgagtaccggaaagtttgcgcctcttcattctatgaatgacctacgggtgccattcattaaagacaattttttgnaaacaaagtgcttantcaccatccangaaagcctttatctgggatgaanaatcttgaccgttggctgtggcggggggttatttaactgaacctctttcaaaag

SEQ ID NO: 2886 - DNA, 156 bp, Homo sapiens
  misc_feature (1)...(156): n = A,T,C or G
aaagcctgggcagaggccntaattncttctnggggaactctcaaaggccnnncaggntnnaaganctgtttccattctggggatcatgtcttctccatgntgtacctcttaagttttccatgatgnctcaaagtaaaagctttaagaaaagaaaaa

SEQ ID NO: 2887 - DNA, 225 bp, Homo sapiens
  misc_feature (1)...(225): n = A,T,C or G
tttcctaccccctgtctgtgcccatgtcctgggggccagagcctgggtctactgtggaaagtgccagagctgacctgctactctccaagagagactcagagcctgtgctggactcaggagccttccatggccagggagacaccctcagcatcctgccagncaggagacacaaaccntgctgtnagcaagtggaccacggntgtgccgagtttgcggacatcctta

SEQ ID NO: 2888 - DNA, 102 bp, Homo sapiens
gggtctacacaataccctatgtagcagaaaggccgatttcttacctattggagaacatctgtctctaaataaaatctcaattgttccagaggaaaaaaaaaa

SEQ ID NO: 2889 - DNA, 129 bp, Homo sapiens
  misc_feature (1)...(129): n = A,T,C or G
agatcacctgagactgangttnttcacagntgttagctanccactgtctgcgcactgggaaccaaacctgcatcttctttgaaaacaccaagtcagctttaatcctaacactcaggaggcagaggcagg

SEQ ID NO: 2890 - DNA, 275 bp, Homo sapiens
  misc_feature (1)...(275): n = A,T,C or G
tcgatcactggcatgctgnccaaggctgcntncatgagngatatcaatctcctttcgnactgntcaaataaaaatggnnctcacctcagncctatgtnacacgacctcacaaangtggtaancagctggaanaggactcggggacctgggcaggctcctccctgcgacggaccttcagcttnctcttgggcatgaccggnagggacaanactntttgctgttttgaaacaaggnctccctntgtagctnagactcccctggaactcactatgatg

SEQ ID NO: 2891 - DNA, 231 bp, Homo sapiens
  misc_feature (1)...(231): n = A,T,C or G
actgaggttcaatgctacaactgangctgantgtnctcaagctacagtaaaagaaagtncagaatcaggagacccagctgccctgggaaatggcttcaaaggcaccactttccaacaagccacccactccataattcaaataagacagctcaaaagatatgtttttattttgggggagggggagacatgcatacccatccctaataaactaaatgcttgaaatacagaata

SEQ ID NO: 2892 - DNA, 391 bp, Homo sapiens
aactgaggctggtgacatggctccctgatatccaggatgatatccaagtggctacaatgggcgacatcccaggtttgtgcccgaatgacgatgtgcctgctcccctctaccagatcccgagcatccaaggatgaccatcgaatgctcaagcatggccatcacccatctccccacaagcctcaaggcaactctgctggtttgtaaattgctggtctccgtgcttccagtgaacttggacattcttctcatggttggtccaggagaggccaaagctgagggcaccctgccttccacccccagtccagcttgaccttttatctggagcaacagtgtctagatgatgggtgggtgaggggtgctatactgtctgtccctctgggaagggttcgat

SEQ ID NO: 2893 - DNA, 422 bp, Homo sapiens
  misc_feature (1)...(422): n = A,T,C or G
agactgatatttctctgagtggnggaggancctcagcgcactgaaggcccatggcgcccgggttggtttttcctttcttnttcatcttccttcttttnaaaaggcaacagaagagcctttgccgactctgcgaaaaggtgtcacggaggggcccacccgccctcccatagcgccggcacctgtccagggacggcctcgtcgngccacagccanatggagtntttcccgatngggggggggagggtnttctccttcaagcaattattttatttttttatcgnttttaattttaatcatagggcacatattcaaaaaaagtatttttaaacacaaaaaaccctgaaatgtatatttggatcgttttaaggcaattgaaaaccccacctcaggtatcccgctttatatcgatagctcctcccccg

SEQ ID NO: 2894 - DNA, 347 bp, Homo sapiens
  misc_feature (1)...(347): n = A,T,C or G
taatatactctgatggaactgntggcnttgntgcanncnttncanttntacntaattnacttgtacganctacancngattggaaanacttnnntatnganncngancnttattttggatnnctnnctctgtgtgcnctgagagctgcaatcctggattcaggaaagttgtcctggagagcaagcctacctgttgctttgattgcactccttgcccagataatgagatttccaatgaaacaggtgaaggacaagtttctcagaggattttccattctttctacagtgctctcacaaaactaagtaaagggaaaaaaattnnaccgggggacccccttggccattacg

SEQ ID NO: 2895 - DNA, 405 bp, Homo sapiens
  misc_feature (1)...(405): n = A,T,C or G
cactgaggaggcagaagcaaatggaactctacctagttgtaaagccagcttccttggtctagacttccagcccatccaagactacataagagatgtggcctcaaagaaagaaaggagaacgagttggagaaaagctgtcacgaccctccaaaatcaatatatttacagcttcctgagaggacggcgatgctaaagactgtggcatnggggnaannngtctaaaaaagtgggnggcttgacaaccccttgccagaaccatcattgnnaacattggcaaggtgtgtganctngaccgagaacaacaccccccntgtgtggtgtgcccaggacccccaccagcttgnccttgctcccattggccgagttttgaaaaaggtatgcnnccaatggaccaacaaaaacctt

SEQ ID NO: 2896 - DNA, 334 bp, Homo sapiens
  misc_feature (1)...(334): n = A,T,C or G
gaggaggacttccggtttcncancacacccgtnttntntncagccgtggngctgnggctcacagcaggcctgcgcgggcgggcgatntgtgtacgccgaacactacatcaccatcccggtgggctgcncctgcgtgcccgaacccggacaaatccgtngacacgtgcgaactccagcatggacaanctgatgctggggcccgncgacaggcctgcggagccgcttangccggggactgcccccatggaccaanttactgnatgcatcaaggacccnggccctgaaaaacccaccccatgatcntgggncctgctaatttttcaaaaaggaaaat

SEQ ID NO: 2897 - DNA, 344 bp, Homo sapiens
  misc_feature (1)...(344): n = A,T,C or G
gaagaactgagtgtgagccctgataactgagtgtgctnagtgctggtctgccatgctaagcctgtctcccaggaccaggtgacctgtcccttcagcttctttctcacacgcagatgaacactggacttcagaaattgtgaaggttccgaccgctgcagaggggcttacattgggaatggcccctcttgcccctcacccattcaagagcatcttccacctgttccaggaccaatgtgtctcattcccaagtggcaattagttgtctagaaattcaacacttctctgtaacgttagactgttttgttgtaaattcttgcacctggtcttctgttgcacagttgggc

SEQ ID NO: 2898 - DNA, 808 bp, Homo sapiens
  misc_feature (1)...(808): n = A,T,C or G
gatccctgtgctcctgagccttcatgtgggatccaagattctcctggaccctttgccacctgcccttcgtggctctggaagctcccgccacctgttctgtnaacctgaaagctccctggggtcacctactccatccctgaaangatgccctgcactaaattctggtcgaactcccagcgcccacgagtgtgtgcctgtgcanagtccacttgcgttgctgagttgcccgttgtgccaaaangcgtttgacccgaagctgacncagctagatgtggatagccaccttgctcactgcttggctgantgcancgaaaattggtgtggtgagcatcngggtgccttgctgtatctccttcaaacctacacancgacattggatgtggcttctganacatcgtcgtgtggacacctgaatnttggctccntctggttttgttcatgggcattggacataatgctggtcactgacagcaggnaacactgatcctctgtggantcatcttcattgtcagcctgacaggattggaatcacccaggaaanacntctcaggtgtgcctgtnaaaaccgttccccnaaaaataactggggaaanggaaatcccccctgaaatnttggtggcnccntggnctggggtcccnctgaattgaaaaagggaaaaatggaaaaaattgaaactgtttccncccctgggggangttaataaaangcnccgccccncctgctnnnggganccataactacttttggtnacngtgcccccctgncccngggaaagttccttnactgtnaaacccaaaaaaattttaa

SEQ ID NO: 2899 - DNA, 156 bp, Homo sapiens
  misc_feature (1)...(156): n = A,T,C or G
gactgagctcaaggtggggtccaaagaccctgtgttaagcactcatangtcaagctggggatacaacccctaaaaacagcacacccaccatgtttaacctcatgaagaaagataaggacaaagatggcgggcngaaggagaagaaggaaaaaaaaa

SEQ ID NO: 2900 - DNA, 363 bp, Homo sapiens
  misc_feature (1)...(363): n = A,T,C or G
tacaatgaagtgttttaattgcaaccctgatctttccgagcttgaagtggtgaagcctgaggacagtgggatagaagcttcctacagtcccgtgtgtttggaaccttcctgtaatgactgtgttanaaaccatganaggttgtntttcatcgactcaccaattgngggacatgataacaaggaaaatcaacgcgtacaaaacacactanatagttcaaacgaaacagaanagctagaggccagtaaactgtatgaggacagnggntactcatntttcacacaaagggaccgngacgatggcatccttatcctggagaatttcaaaaacagtccccaggcccgtntgntggcattaaaaaaaaa

SEQ ID NO: 2901 - DNA, 151 bp, Homo sapiens
aactgagatccgtccagaaagtgcccagaagaaacttcctcttagaaaagctgaaaacacagtatttataacactggaaattgtaaagaatttgtttaaaatggctgaaaacaatagtaaaaatgtagatgtatggcctaaaacaaaaaaa

SEQ ID NO: 2902 - DNA, 390 bp, Homo sapiens
  misc_feature (1)...(390): n = A,T,C or G
actgagataatatttgatgatgagtganccgngtcctcaagaangccagtnncactgnanagagaggaaagancaccaggggccacttatgcnnataaactgncaggacgngtccttnaagttntggaanagagngctccagtgcatttcaccatcatcttcacaggatggaagctatcagtttgncctatggtttattttctaggaacccaagctactttcataatgaaaaaacagagatggaaaagacggtgtctgactgctggacaagtagttaccaggngngactaaagaatatcctgnngntacatccattcggnngacatggttccatgtaggcagactttnttntctanagcttttggaaaaaaggaaacctcatttcaggac

SEQ ID NO: 2903 - DNA, 491 bp, Homo sapiens
  misc_feature (1)...(491): n = A,T,C or G
actgaggtgttgccatggtgatggctgtggaagacagcgtggttcgggtggtcgtgcgggtgaggcctcccacccctaaggagctagagagtcagcggcggcctgtgattcaggtggtanacgagcggatgctggtatttgaccccgaggagtgtgatgggggatttcctggcctaaaatggagtggttcccacaatggccccaagaagaagggcaaagacctgacatttgtctttgaccgtgtctttggtgagatggccactcaggaggatgtgttccagcacaccacacacaacatcctcgacagctttctccagggctacaactgctcagtgtttgcctatggcgccaccggggctgggaagacacacactatgcttgggaaggganggagagcccggcattattgtacctgaccaccatggaactgtacaggcgtntggaagcccccaggaaaaaaagcaattcgaggngctcatcaagttacctgg

SEQ ID NO: 2904 - DNA, 488 bp, Homo sapiens
  misc_feature (1)...(488): n = A,T,C or G
acggcagggtatgtctgtgctgagtctctggagccagatttctgctgcgnggtctcacagnggcgggtaaacccaagcctcttccggtccctaggaaagcgatgcaggctggatgtcaaggattcctttgaccaagctttgctgacctctaggcccagccagggtttgcaggatccacagccattgtttcttccaagccccccatactgggagaagccagctttggcctgacttccaccaccaccatttntgccccacanaaggttcctagtcaggaaaacctacaaccacaggacacacctgtgtgttccacagntctgccttcttccacacccagcaaaaaattcccttcctgggaggaaaccagtaggngacacaaacacttatgcaccttctccctaatttctgggganaattgagcccttggtctggttacctgnaatggttataaaccaaataaaatggttctcaagagttaaaaaaaaaaa

SEQ ID NO: 2905 - DNA, 407 bp, Homo sapiens
  misc_feature (1)...(407): n = A,T,C or G
tgaggaagaagttttggtatgaaggtccctccctggggtctcacttgacccccaggccatccaagcatgagttcctcacgaagaccacctcaaagaagactaggaaggaagacagcatccgcctgagggtcctgaacggccttctctacaaatcattgacggaactgctgtgcactcctcaagtgagccaggaggtctacgacctgaatgtggagctgtccaaggtctctgtgacttcaaacttctcagcctgccgagtgtactggaanacgggggtctctgcggagcaaaacaagcacacggagtcggtgctgcanaggagccgctgcctacataaggcatcttctgatatctcaacaaaccctgaaaaatgttccacccatagtgtttgttcaagacaaaaaaaa

SEQ ID NO: 2906 - DNA, 170 bp, Homo sapiens
  misc_feature (1)...(170): n = A,T,C or G
gcggatggccatacttacatgtgtggtttgaatctgccagnanaaaangctaaaccacatgatgtacnnattaacatcnnatcatacctacgagtgcatccaantacaataancaccggcagccgcaaaaatccctgacttcccccctcnatnacacaaaattaaaaaaa

SEQ ID NO: 2907 - DNA, 233 bp, Homo sapiens
  misc_feature (1)...(233): n = A,T,C or G
agactgaggagcctgaggggttcanacggaggccttgaatctcctggagctgaactgcctgacatgaattctgggaagtgaatttaggtcttccanaagagcagtatgcactcttaaccactgagctactcatttttgttgcaggcgcctgcaatgaggcatccgctgcttctggtgcttttcagcgactggactaggtttctcctcgtcctttccctcctgaaaaaaaaaaa

SEQ ID NO: 2908 - DNA, 511 bp, Homo sapiens
  misc_feature (1)...(511): n = A,T,C or G
cagacataattgttttgtctgataatgaggcctccagtccccgatccagctcccggatggaagagagactcaaagcagccaacctagagatgtttaaggggaaaggcatggaggagcggcancagcttatcaagcnactgagggacnagctacaattggaaaaagctcgcctggtgctgctaaanaaactgagacagagtcagctacanaaagagaatgtggtccaaaagactccagttgtacagaatgcagcatctattgttcagccatctcctgcacatgtgggacaacaaggcttatctaagcttccctcccgacccggggctcaaggaattgaacctcaaaatatgagaacattacagggtcacagtgtcatccgttcaagcaaccaacaccacccttccacacatgttgatgtctcaacgtgttattgcccaaatccaacccaactttanggccagcggggtccaccgaaacctgncattgtacgcaccacacacctaacatgaat

SEQ ID NO: 2909 - DNA, 209 bp, Homo sapiens
  misc_feature (1)...(209): n = A,T,C or G
tctctaccctccagagctctcttgagtgctgaggcttcggnctgacttgcagccgctgnanagataacgcctgagtcctgaattgctttacctattgcangttaaaagnctacagttcaaacaaaaaccctgactgtctgagaagcagcatcaatctgcagaagcggcctctggagttatacacagataaggacacaggatgaaagacg

SEQ ID NO: 2910 - DNA, 471 bp, Homo sapiens
  misc_feature (1)...(471): n = A,T,C or G
cacccctcagatctgtcttcaaaaggcttgttcaagtgccaggagtggcggagcacgtttgtgatcccagcctttgggaggtggaaacagaaggatcggaagttcaaggccctcctcagctattatagcaggcagtacattccgtgttcaccgtgtgccagctgacggntttcaggtgagttgttggctcattggccacacgtcactctgagccaggngatgtggtcatctccatttcatggatgcacgctgcaaaccctgtgttctttgggaanacaatgtaagcctgaggggaagtctantaaggcaanaggctaggggtgaggaagggctgaaanagggaactgagatccattcgaaactgccatgcaaactataaagtatcctgngtgngtctttacacgtgcctaatggngcttcattananacaactgggtttcgcactgccacttaacattgcaaagtcacttg

SEQ ID NO: 2911 - DNA, 332 bp, Homo sapiens
  misc_feature (1)...(332): n = A,T,C or G
aactgaggaatcagagactcagccaattggatgtccgaagactcgggagcagggagggaagcgaaggangggcngaagatgntnacancgcngncngngnatgnnctnggaggncccgnctcctcnctttctataatctggcggnncttaantgnatnaccaatnnnatcgggcctacctnccgagctgaccaatgggagccggaagcgttggccaggcgtgagggtcgcgaggcggcgtatggcggacgcggtgctattcgagtttctgcacaccgagatggtggcggagctgtgggccccggacccggacccaggctcgggggggagcgg

SEQ ID NO: 2912 - DNA, 160 bp, Homo sapiens
  misc_feature (1)...(160): n = A,T,C or G
aagaactgttaccagaantcgtgcaccttcagtccgaaggttacctctgcctccgcggcgtcaactgcccccctctcctgaccggaacttgcccggctgacaaatccagagattttgaagagttntganccaccactgctnagctacaaaaacaaaacaa

SEQ ID NO: 2913 - DNA, 435 bp, Homo sapiens
  misc_feature (1)...(435): n = A,T,C or G
cgtctacgctcctctntanactgaggtacagttaaagaatctggtgcaaaacacaagggacttattgaaatacccagcctttctgaagaaaacgaaatcaatgacactgaggtgaacgtgagtgaaaagaaaggagatggggaaatactgaaggatctcatgagaacgacaggcaccgccaaggncagggaggcccttggagagtacctgaaggcactcaagacggaatttacaacaggaatgatncttaccaacaaaagctgtagcaacccaaggaacttgactcttcaccagggaaactgagatgaaaacaaagcntgcaggctttcttcccaggaggtcactggggtgttgaagggattcccacaggnagccttttggnacctttgnancannaagnttggttttgnccaccggaccagtcaggaaacccag

SEQ ID NO: 2914 - DNA, 210 bp, Homo sapiens
  misc_feature (1)...(210): n = A,T,C or G
tgggcagaggccataactacttcttggggaacnctcaaaggncggacaggaancatggctggcatccatatatcgtactgcctcgatcagagaagatcctatactttctaganaataggaacntccgaatanagaaccttgcagaaagctcagacgntctnacgtncngaggaagcgangttgaggtgcgtgggacaaaagaggagagaa

SEQ ID NO: 2915 - DNA, 322 bp, Homo sapiens
  misc_feature (1)...(322): n = A,T,C or G
cgtggtgactattccactttcatttggaaagaacacgcatcctgctggctggaatgcggctatatcatcaatcaactctgctcatccagttacatccctcgggtcatctctgcccttagctagcccataggnnggctcgttttacatctagaagaggagaggaacctcaactngangaaaaatgcctctgtaaagatcaagagctagtcatgccaaagcccgngtnagggcatcttattanatntacttggaatagattangngggggagagggcccctgccccattganttgngnttggtngcccattcccttagagctag

SEQ ID NO: 2916 - DNA, 109 bp, Homo sapiens
atgaactgagacattgtctcatgtagttccttctgtggacgtttggagtcaagaagtcaatcgttctgataactacagattggattcctaaaggtgcaagaaaaaaaaa

SEQ ID NO: 2917 - DNA, 279 bp, Homo sapiens
  misc_feature (1)...(279): n = A,T,C or G
gaatgtcagcgggacatccctgagcagcaccgcagcgcanatgtgcacagatgaggcaggaggacggcaggtggagtaagctctctgatgatgtcactcataaaaagcaagccacgagccaggttggcgacatagctcaaggggtanagtgctcacggaggagccgcagcgaaaaccctgggttcttccatgcccagcaccgtataatccaggtcctgtgttnaaatcccanaaaccacatgggggntcacaaccctttgtaacgagatctgactccct

SEQ ID NO: 2918 - DNA, 471 bp, Homo sapiens
  misc_feature (1)...(471): n = A,T,C or G
ggactattgagcaagcgtttaagcccccagttctgagccatggcctctgcagtcctcagctctgtgctcacaactgcctctcgctttgccctgctacaagtggacagcggcagtggctctgattccgagcctgggaaaggcaaaggccggagtaatgggaagtctcaaactctgggaaacaaagcaacctcaaatgagaagaaacgggagaagagaagaaaaaagaaggaacngcggcanagtgaagcaaacgagctcaggaatcttgctttcaagaaaattccccagaaatcctcccattccatttgcaatgttcaacatgagctttcatcgccnaacccnacncaaaaaggngtcccgggaanaaaactggcaagaagnggggacccgaangatgaaccgctgacctctgaaatgtttgaaactgaccttgaaaaagcgttgctgttgaataaactggagtatgaaacc

SEQ ID NO: 2919 - DNA, 283 bp, Homo sapiens
  misc_feature (1)...(283): n = A,T,C or G
gactgagagacaaagccctgaagagtctgnaaatgagtccgcatctttaagtcatgagctataaccctgagttttggcacagacctgatggcttgagcctgctgatgtccagtgttctggaaatccagtgcccatagatgtggactaaggaagagcccggccatggtcactctcatcacagagaagctgcagaaccagagtttggatgacctcacccgcagggcctgtgaggctggcccgtattntgctgagaanctgaacaaaagnggccatttgttccctt

SEQ ID NO: 2920 - DNA, 369 bp, Homo sapiens
  misc_feature (1)...(369): n = A,T,C or G
actcgagggacacatgcctgtgtctcacaanntgctnccctgcctctactntgtgaatttnccaaactctntaactctgattcatcttaattcactcttccctgtagnttgtgtgtaaagagcccttaaagcaatatggtggagggtannagntgagagccngtggcnngcanngcctaaacttggtacancaaaggaaatttcnagggacttgntnctgantctgggagacacaggcgatccatcctctcccctatttctaangaaacagtataactttgggaaatggatgattccatgtttaagaggcctgnnattgtatacttggcatttctgatttcagttctaaaattctgtcccttcgtcata

SEQ ID NO: 2921 - DNA, 164 bp, Homo sapiens
  misc_feature (1)...(164): n = A,T,C or G
tgcaatgcgggcacccttcccatgntgaaaggaatcctttgtcactcaccangtgaatgagactatactgatgggcctngcctgtaaaaggaacaatatttttctttctttttttcatgccaggttattaaagatatagtgaactgaaagttcaaaaaaaaaaa

SEQ ID NO: 2922 - DNA, 384 bp, Homo sapiens
  misc_feature (1)...(384): n = A,T,C or G
ggctgtctctgccaggaagtcacgctgaacaaacaggtgaacttcancaaacagaccatcgcggggntctncnaataaacttttncaagacnttnnnntgtagnnncacannaacagaatgagaccctgnccccgctggagggngagatcactcagctgnccaaactcagcggccagatccaggagacagctcagaagccggacctagacttcctccaggagttcaaaagcacactgagcaagtgcagcagcgtgcccagctccaagccaaccacagnctcatctgagatgaagaataaagtgtggaatgtttccctcaagagtttcgtcttaaaaggattgctgaagaagttcaaagaggatctccagggagagctggagaaa

SEQ ID NO: 2923 - DNA, 368 bp, Homo sapiens
  misc_feature (1)...(368): n = A,T,C or G
actgagaaacgggcgtgcaggaggtcagaaccaggtggatatgaagtgcagcggccacatgctaaccacctgtgccctgctgtcctggagcacagaggaccaggagcccaggccacgaggcctgcctgcatcacaaccagactgtagccaggagaggctgagctcaatggttctgcagaacggtggaaggagttcggcccagccttgcctgaggtgtatctcgggggagtctggncattntaatcntaccnaccatcattataaganncatatggnnctgnngaaatggctaacgggcntaaaangcntactganctttctaaaggnccnatgtnanaaaccactaccaacctggggggtttccacac

SEQ ID NO: 2924 - DNA, 338 bp, Homo sapiens
  misc_feature (1)...(338): n = A,T,C or G
gcagccgactgtgaagaagaaaaagaagatggatttactgaaacncatgcaggaagagccactttncgaggnggagccntgtnccagnacnncatntcctagnccngagaanaagaagaacangaaaangaagagggnngctntgnactaatgaaaaggaaccatngccctgtncccnancncatnntgcttacgattnanttgggagcanagnncatcagatgctctcatattatcccgggaggttgaatatctaacttttcaagcctttttgtgtcttgacatcaactgttgaccttagtctttgatacacaaataaaatattttctttgtattat

SEQ ID NO: 2925 - DNA, 373 bp, Homo sapiens
  misc_feature (1)...(373): n = A,T,C or G
gtggaactctcacaaggtntggacaggaaccatggctaggatccatatatntactgcctcgatcgactaanctcttatactttctaaagaanaggaccttncgaatcggaactttcaaaagctcgacctgnacgtcttctaaagagagagggctggataaanggaggnnngnggcngggnnaancnaggnngtcacacactnanncannaanccctcctaanggagntttccaccatntcctgaggctgcactgcctgagagccactgactgccttacccatgaggctcctgggctggagggcgagcacaaggagtggggactgacttcaaggttggagagaagcgcanaccccnaggctcgtggtgaaagcc

SEQ ID NO: 2926 - DNA, 141 bp, Homo sapiens
tgttaatggatatacagatccttctgcggaggaattgagaaatctaatgatgttgcatggaggtcaataccatgtgtattattctagatccaaaacaacacacattattgctacaaatcttcctaatgccaaaaaaaaaaa

SEQ ID NO: 2927 - DNA, 279 bp, Homo sapiens
  misc_feature (1)...(279): n = A,T,C or G
gttttgcctggataacgacangaagatggtggcaggatcccccggaagtgatgttacaaggcactcacctgncactgncaagggcngggcaggccatccttccgagcccatgggagccgggaccactaagactgctggtgggaanaagttgggtgctgggctgatggnctngctttctnttggncttcgnttgtaatgnggctggcccatgttggttttatgtttaatgctgcgcttatantaanaaagagcccccccaagctgtacatttataaaaag

SEQ ID NO: 2928 - DNA, 300 bp, Homo sapiens
  misc_feature (1)...(300): n = A,T,C or G
agaggtcatgaagcangggngcccctcnccccncccccctgnngggannggntgattactttcctnaaaaanaccacnggngggaccgacctttggccactcacaggnaggnggaagcacttgctatctcattccctaaggaccaatcantttaaaagtctcactgttttgccaatcacatngggcctanactctggggcttnattccgctcctggaaactgtnaaaaaactcatnanngggccgcctttcnttngggggcaggacacccccagcntgctggaacaaaaaattccttttg

SEQ ID NO: 2929 - DNA, 152 bp, Homo sapiens
  misc_feature (1)...(152): n = A,T,C or G
tccttcacaaaaaaatctctacanggatgtgatgctggacacctacaggaacctcactgctataggttataatgngganagaccatatttattgaaacaacattgtcaaagttncanaaacacntggggaggctttttttcatgtcccaagt

SEQ ID NO: 2930 - DNA, 284 bp, Homo sapiens
  misc_feature (1)...(284): n = A,T,C or G
gggggccaagcacatcacaacacctgggtgggtgttcggtttttctccaaagcttctggctgnnctccgccaaaaactgnaggtgctgggtcaggaaaactgccttgtgcaagcttactggggaggcancacctcgaaaacaagctgcaaacanacggcagccaggccagccgntttttcaaccagggaaaaantanagccngtttttttcctgcaacttatcaagtcnttcaaaaaaagagganccaaaangaggggatgaggnccatttgaaaataaaaaaa

SEQ ID NO: 2931 - DNA, 302 bp, Homo sapiens
  misc_feature (1)...(302): n = A,T,C or G
caaatgatcgcctcctgtactggagctgtcctgacatcactaatggggaaaatttatgatcccgggccaaattatgtancttngattattctatcaaagttttattatnctggnanaaaagtgatgnanattttgagggggtggcggcggagggatccctcccncattgcacaanaanncatngtttcggttatttgnagnnaccgggnngcattganngaaaaccccgggcctatgntnnntaaaacatttttcttcacaaaaagagggacaanaaagnnccccttggtatcgggcccccc

SEQ ID NO: 2932 - DNA, 334 bp, Homo sapiens
  misc_feature (1)...(334): n = A,T,C or G
aacatgtgcgccgttcnctgccagagctggcccancacanggctgacatgccagagatgggaagagcanagccagggccgntatatacaccgngggagcccccttgcantgcttganaaaacttgggaggacaacaagngggtnctttccgtaagngaggaaagccttgntnaaacaggccatnattttccgggaccacantgaaccccattgcccaaaggcccacaaggcangcaatngcngcccgcncttncctcnttgtaaccaanggagggaaacctgggnggttttttgggtttccgggcccattttttttttttccacctttgggttg

SEQ ID NO: 2933 - DNA, 138 bp, Homo sapiens
  misc_feature (1)...(138): n = A,T,C or G
ggggagccgtctccgtcttcntccctccnncacaatgagagttaatngttgnngntggcgacnccctcagcctgacngtgnattgatcccntctttgacagntggactttcaaagaccntatttcaaatgaaggtggg

SEQ ID NO: 2934 - DNA, 239 bp, Homo sapiens
  misc_feature (1)...(239): n = A,T,C or G
tatgcacccagggggggacgatgaaanaaatctatnnnganctctncaanaacaccngtgggagcacaatagctganattcgaaggcttgnggattganattgaaaaacttgcaggtggcttgcaccaacaggaacttgntgagatgaaagcacaacctgggagttaaccatggcccganatgcggnaaancctgnaaacaggancggnatttggttcatcgccgaggggaaagaaaca

SEQ ID NO: 2935 - DNA, 136 bp, Homo sapiens
  misc_feature (1)...(136): n = A,T,C or G
tttttttttccaagaatttaaggctcctgacatattcatggaagtgctgccaaatccccgggtccccgattaaaaaaaatctgggggggaattttagggaatatggntngtttccggnaaatatgcgagtccatca

SEQ ID NO: 2936 - DNA, 256 bp, Homo sapiens
  misc_feature (1)...(256): n = A,T,C or G
aaagacatcctgaaancttctccagnaaagagcccaggcacacggcctgaatatgaggcnggcgggaacccccttcatagggaaaaggtggcccancaanancaactttgtgctgnctgtggccgnagngcttcggtggntttggncaacgtcgggngtttcccgtcccttntgntanaaaaaggggggaggggcgtncctcaatnccgtatttttattttcttnttgggngagccngccccgcctgtgttttttt

SEQ ID NO: 2937 - DNA, 297 bp, Homo sapiens
  misc_feature (1)...(297): n = A,T,C or G
gcaagaaaggccttcctgccgagcagggtgcgggcttgatctccnacnctgggtnttagngngganaangccnctttnttttctgaaaagnggaagcaaaacgcctcccncttgcacaggggggccatgggtaaaccccttggtggttaccacctgattgaatggggggggggtttgnaatgacnntctggnaccaattgaattaaaaaangggggaagcntttttttncagttaaagtnggggggttaaaaanggaanccaaccctgaaaatttggttttaaaactaaccttgccc

SEQ ID NO: 2938 - DNA, 282 bp, Homo sapiens
  misc_feature (1)...(282): n = A,T,C or G
aaaatgtgctatggaggctaaagaatggnacttcttaaagaaaatatttgctttntgcaancgacggagtcagtnaaancanccagtngcaaaaagggttcaccagggctgncttacgngggggaataaaaaacctgccantcaagctgcaatggattganctctgcgggnggttncaaanggaaanattttgttgaaattgagcgtgctcggctgactaaacccttancnctattaaaagancaaaagggcgattgtgaaaaaggctgcctcctccttcaa

SEQ ID NO: 2939 - DNA, 231 bp, Homo sapiens
  misc_feature (1)...(231): n = A,T,C or G
attttcttttacttcggtatttcctntntttattntnttttttttctntccntggtcntcttnttntgnaatctnncnntttttantcagtattganaanacagccacggctgtggcccactgcaaacggggtaaatgggctcatcaaggtgaacggacgtcccctggagatgatcgagccgcgcacgctgcagtacaagttactggagcctgttttgcttctgggctttt

SEQ ID NO: 2940 - DNA, 142 bp, Homo sapiens
ggaagggaaggttctctcaacctgctcgctgctcctatgagatgcctgtggagttctgagtctgtgtggctaaaaccatgaagttctgattaccgaaacagtgctggcttgatggaagatctgtctggagaggttatatata

SEQ ID NO: 2941 - DNA, 429 bp, Homo sapiens
  misc_feature (1)...(429): n = A,T,C or G
agactgaggttttgtggagtcggagctgaagaagattctgtcagtgcaacgagaggctcgcctctggaaggtgggcaaccccgagggccgggagctgctgacccagccagacatcacactggaggaggctggcatggtggacggccagcacctgctcctggaggagatggacgagatgggaaactggccccctccagattgaggcccgtgccggcaggagcccaccgtgcccacactcctgggaccccagtctggcgtgtgcctcttcttgggacacatgcaaggagtccctgaggccctgngttttgggatgaagtaacatcctgtgtgtgtgcgggtggcctgcctggcacttgtccctaccccgtcagactcctgcagatgacgttattaataaaaagcttagttttgacatttcaaaaaaaaaaa

SEQ ID NO: 2942 - DNA, 207 bp, Homo sapiens
  misc_feature (1)...(207): n = A,T,C or G
atggagtatgccttgtnntgccagaccancccctattattgcattgtgtgaccctgtngtgnnanannnctttntatgcatcctgnncaanntcttnaaggggccanagccggcgcctaactcggggtccatcacttggctcantggatgaccactttgccaaaacacttaggtgacacattggctttagatcaaaagcacccaaga

SEQ ID NO: 2943 - DNA, 147 bp, Homo sapiens
  misc_feature (1)...(147): n = A,T,C or G
gtatcctgttttatattttggtctttgacccgttnggacttgagttttgtgcagaggaataantanggatctatttggatncttctacattctgacatccagtttgaccatcaccatttgctgaaagaagcgtgcctttttttccag

SEQ ID NO: 2944 - DNA, 127 bp, Homo sapiens
  misc_feature (1)...(127): n = A,T,C or G
aaaactccatgagcctcctgatacagngtcagatgacgacaaagaccatggaaagaaaaaagggaaatttaagaaaaaggagaaaaggactgaaggctacgctgccttccaggaagacagctctgga

SEQ ID NO: 2945 - DNA, 107 bp, Homo sapiens
  misc_feature (1)...(107): n = A,T,C or G
cagcctggcctacattgngaaacctcatttcgggaaagtgaaatactttgtcaattaacatgcacccnggttcaataaagacttttggaaagtgtcaaaaaaaaaaa

SEQ ID NO: 2946 - DNA, 173 bp, Homo sapiens
  misc_feature (1)...(173): n = A,T,C or G
ggctggcctacgttgntaaacctnntttngggaaagtgaannactttgncaatttcatgcagccggctcaataangactttnggaangtgtcaaaaactatncntggctaaanaatgggcctcccctcttctttataaagcgtgtttgctgacattaaaattgaactttgatc

SEQ ID NO: 2947 - DNA, 162 bp, Homo sapiens
  misc_feature (1)...(162): n = A,T,C or G
taattacttcttgtggaactctcaaaggncggacaggaaaaaaaaaggagccctaaanggaccgggggggggggggnttttnnccttnggncacaaaanancnccccttntttntnnggttgcccngatttcccttngtacctcccgacatttttgataaaa

SEQ ID NO: 2948 - DNA, 306 bp, Homo sapiens
  misc_feature (1)...(306): n = A,T,C or G
ctgaggtacaccaggggttggaaaaacccactaggcanagaacttgcatcaagatcaggcctgaagtacgttaaccgtggganatctagctcgagaagggcnntnatncggacngctncgangnngagtatngntgncccattctaaannaggatagggntgcccatnagntagaacatctcntgcaggangnnggggtgacatgaatattaccccggagtgtntacttcttccccngcagctgggcctntatatgtgntgagagccgatnaacaaaatgaatggtngtattgtttacaccacctg

SEQ ID NO: 2949 - DNA, 162 bp, Homo sapiens
  misc_feature (1)...(162): n = A,T,C or G
ttgtggaactctcaaaggtcctgacaaggaagcatnngcagntcananaaaggggcagcctggcctacattgaaaaacctcattttgggaaagtgaaannctnngtcaatnaacaatgcgcgatggttcaataangacttttggaaagggtctcaaaaaaaa

SEQ ID NO: 2950 - DNA, 215 bp, Homo sapiens
  misc_feature (1)...(215): n = A,T,C or G
ctggggggggaggaaaagacncccgggagnggganattttttttgagacaaaagatgtnttccagctgaaanacctggagaagcttgctcccaaagagaaaggcataccccgccntgtcagtgaaaggaagtccttcaaccctattggatgacgggttggttgactgcaaaaggatcggnaccnccaattactatggggcttttcccgagcaggg

SEQ ID NO: 2951 - DNA, 153 bp, Homo sapiens
  misc_feature (1)...(153): n = A,T,C or G
tgggatgccaggtctgtaccaacacacccattttntgtgtgagtccatcacangtgagcaaanaccgaaagnaggcagntttttntttgtttggggggaggaangcttaacggcccgtgaaaanaagnggccaggggtttgtgcaaagccgat

SEQ ID NO: 2952 - DNA, 304 bp, Homo sapiens
agactgagatgtcaaaaaagattggtcggaccatgctctctggtgggaaaagaagaggacttggctgcttaagacacactggaccttggataagtgtggcatccaggcagatgccaagctccagttcaccccgcagcacaaactgctccgcctgcagcttcccaacatgaagtatgtgaaggtgaaagtgaacttctctgaccgagtcttcaaggctgtgtctgacatctgcaagactttcaatataagacaccctgaagaactttctctcttaaaaaaacccagagatcccacaaaaaaaaaa

SEQ ID NO: 2953 - DNA, 219 bp, Homo sapiens
  misc_feature (1)...(219): n = A,T,C or G
aaggccctgttgggggtgggtgcngnctagagnggaaacaatgacncctttgagnggagaaaccttttgatntctgtgngcaacacggatcacaacaatctggggtgggggctgggggtctgaacctgcccttttttttttgttagggaccttcttaaaccagtcaaggctgccagaaaaacctttttaaaaacaatggtgcaaaaaacacacacttgt

SEQ ID NO: 2954 - DNA, 240 bp, Homo sapiens
  misc_feature (1)...(240): n = A,T,C or G
cctcccccaacaaggccatttgtgnccccnccctgtaaaaanggatnatnatgangaacacccngtggaccanntnatcacccggtctggctgtgctccctccctctttgcaaagcaaagattgnntggcccaacaccaanactggccccagtgccancccngaaggtgcaggccttnaaaggattgtntgattgcccancaggcaaaacggggggaggagctgccaaggaaaaaaaagc

SEQ ID NO: 2955 - DNA, 287 bp, Homo sapiens
aagggcaagcagcgtggctcaagccgctcacctgcaagccttcgtcagccctgtagtcaagaggaagccagcagcttcactacgtagtgtggaaagagatctgtctggtgacatcggaccagcgtgcttgtgagatacatgtgcatgtgtgcaagatgacgggaggaagaagcaaggaatgttttaaggaatcttcgtgtgtagcagagttttctctggtgactcgcaatctatctctcctgaaaccagtaaatgaattaaaatgaattaacttaaagcaaaaaaaa

SEQ ID NO: 2956 - DNA, 180 bp, Homo sapiens
  misc_feature (1)...(180): n = A,T,C or G
cagtgctacagtcacaggacacaaggacggnatgctggcacatgntngntgcnacacaggatgngctatgacatncntnntnncatgcacccgatgacacttctcatcacttttcccccaggntacttctttgctctncctngctgaatttatgtaaaacgaagtgccaaatttaatgat

SEQ ID NO: 2957 - DNA, 304 bp, Homo sapiens
  misc_feature (1)...(304): n = A,T,C or G
gtccacgtaatctggggaaagcagtttctctggaaaagctttgcttcctacaaacacgcgctttccctgaggcctgcttgcagccattggacacttggtctagtgtgtggatttctatgtcttctgtcgtaacanaattgtctctgtgccctgtgattgttttgggtagggacgctttgtatccttgtacagtagtcttgacgattntcctcccctacgccantttttggttggngnttgctatctaaaactggtatatttttctgttggctaaataaatcaaagatttggaacttttaaaaaa

SEQ ID NO: 2958 - DNA, 286 bp, Homo sapiens
caactgaggttggggatttaagagtggaagattgccaacagctgtggcctcccatgagggtgtcccctttcaagttctcagaacggacgcaggactgcagatctgtgctggcagcagcagaggctatattcccagaggagtctccagccggcctgaaagcaaatatcctaagtgacatgtctgccaattttgttctgggtgggcacatttggtaatcctgtctgtaccacaggatcttctatgccttttaaaaataaacatttgtttataaaccagaaaaaaaaaa

SEQ ID NO: 2959 - DNA, 118 bp, Homo sapiens
  misc_feature (1)...(118): n = A,T,C or G
gattaaggccagactgacctacattgagaaacctcattttgggaaagtgaaatactttgaaaattaacatgcanccnggtccattataagacgtttgtggaaagtgtcaaaattaaga

SEQ ID NO: 2960 - DNA, 110 bp, Homo sapiens
  misc_feature (1)...(110): n = A,T,C or G
gtaaggtttgggctgatgtaaatcctgnacaaangncataattacttnttgtggaactntnanaggtncggacaggaagcctggctggggtcatatagggtgcctgcctc

SEQ ID NO: 2961 - DNA, 324 bp, Homo sapiens
  misc_feature (1)...(324): n = A,T,C or G
ccaactgagcgtcctgagaacaaaatcctacntctgtcagcctgtggganggagganagatcatggnntctgagcctgtngagagacccgagagccccctgcccttaaagggcacacctggagtccccaangatcaataggaggtatntctgggcagccgntcctatcctncagctgtcggnaatcnccngancanggaacanaacacgcctcccaagnctcctcatagagagctgggtgcctgcaagggctctggaananctgnacccaccgtgagaagctctcccactcantgcggaatgagccgagtggttaggagcttgc

SEQ ID NO: 2962 - DNA, 344 bp, Homo sapiens
gaactgaggtggggtctttcacctgaagctggccagtttcctgtgccaaagccttcgaccttggaaagagcagcgcagttccaaaccaaagtcttggaaggaggagggaccatggttcaaacctgtaacaaagaggcctgctgtccagctgccgggctcccttttggccagcaagcaagtcacccctccacctgcagtggcacccggcctctaggagctgctgactagcctggctgagttgcttctaagccttccaagcctgagtacagagagaagcctggggaggagacagctgtgaaagagcaaggatagtccacctgccccctacccaagttttggacgtc

SEQ ID NO: 2963 - DNA, 315 bp, Homo sapiens
  misc_feature (1)...(315): n = A,T,C or G
gctgtgaaaagagctggagtccatctctggaggggctctgnaacctgancacagangtggggcctncgcaaaagtgaggactctgactacctgnnagaccttncaaccaagtggcactgaatagctcgagtcatctttctttaaacaatctttctttaaacaatcacaagcctgctcccaggagcagtgatatcattggttattctacttaatgaaatcataacatcagcattataaaagccccatcactgtaaaagccctcaatagttttccttcctccttcccatctcctgctatcgattgaggaatgtaagc

SEQ ID NO: 2964 - DNA, 322 bp, Homo sapiens
  misc_feature (1)...(322): n = A,T,C or G
gaagaggggtctttcaccaccagcccaagnactctcagctgctctgcagaagacacttccctgcatcgccggagtccccaaagatgtcagccactgagtgtccagttccccnngctggggagaggagngggggngccggagaggagggaaccntggnaggaaactgngangggtcctcatggttgcatttcgcacccttccctantgtccattngtctgtctgtctgctgtccntgtgtttgtagctttcaggttttttttcctttccctttttttgttggagttttgagacntttttgtaccngggggattttatttatca

SEQ ID NO: 2965 - DNA, 181 bp, Homo sapiens
  misc_feature (1)...(181): n = A,T,C or G
caggaagaattgcagagacattcagaaggactgcaaaaggccgacgaagnggctcagcggataaaggtgcttcggtaccagccggagaagcaacttcccagagttatcctctgagcttcacacataacatctctcccctgcacaccatacaatactaataaatatttttaaaaagaaaaaa

SEQ ID NO: 2966 - DNA, 277 bp, Homo sapiens
  misc_feature (1)...(277): n = A,T,C or G
tccaccagaaataccnccagacccaggttgccctcagaaggaaccaggctggctgatggcatggcagacctgaaggtattgctttaaaaggagggaatcaggcctgaggcatcaggcctgaagggctaggcaggggctctgcccaggagggccctagccaggcctcagagcctcactggagggtagtcatgggctaagggcccaggctgactgcatttccactcccttcggagacttatcgctatcaaataaatatagaaaagagccctcccccgcc

SEQ ID NO: 2967 - DNA, 275 bp, Homo sapiens
  misc_feature (1)...(275): n = A,T,C or G
tccctgactttgttttcactgagaaggagggcatgtntgatggcagctgggccctggctgatgtcntgagccagctcangangangcgggcagccactacactagatgngaagattgngaangnccggaagagaaggatggctgnggactnggangccnagtctggganggtggnggngaatganggccaggcagactctgncctganggggcnggnnantccgggtgaggatgaggcaggctccaaggatgaagactctgagactgactactcc

SEQ ID NO: 2968 - DNA, 128 bp, Homo sapiens
  misc_feature (1)...(128): n = A,T,C or G
ttgaaacccctgagtggnttngggctgagtaaaacctgggcannggccataattacttattgtggaaatctcaaaanncgacaccannaaagcatngctaggttccttntttttataaatcttaacct

SEQ ID NO: 2969 - DNA, 142 bp, Homo sapiens
  misc_feature (1)...(142): n = A,T,C or G
tggagtgtgtctgtctnaagtgtattaatgacgcctgccacnangtggtgggaaagtccgtgaaactncnatcancaggctaggtagtgatggctcantggttaataaccaccgactgctcttgataaggtcctgacttcaa

SEQ ID NO: 2970 - DNA, 231 bp, Homo sapiens
  misc_feature (1)...(231): n = A,T,C or G
gttaatgacacaggcacagttggaagaggctcttnactggcagttgangccncttaaggccattnaagatgccccccnttntggaagaacgaaagcccataaatgncgttttatctggggataanatcttggaagggnacagaaacnaaccaatatgngnttactggtatnttcattataacataccccctcgggggncgggtttttggtggttggaagaaaccaaccggg

SEQ ID NO: 2971 - DNA, 265 bp, Homo sapiens
  misc_feature (1)...(265): n = A,T,C or G
gccccatgtcctttgattttgggttgttttgttgtgttgagacaaggtttntntgtgtancacgttgtnantntgtanaccaggctggcctcaaactcatatttgccttcctctgtttcccagtgtnnggantaaagncatgggccaccnctgggacaaatntgaacatggaaatnnngatagtagcngggtataacacactgcctaaaacagggacccataaatgcnatgacctaaataaattaattaattcaaacaaaaaaaa

SEQ ID NO: 2972 - DNA, 175 bp, Homo sapiens
  misc_feature (1)...(175): n = A,T,C or G
aggtaaaaccctgggcaaaggccataaattacttcttgnggaactntcaaaggtcgtncaggaaccataaaaaagacncaactttttgcagattaaggccagcctggcctactttgannaancctcantctgggaaagtgaaatactttgtcaatnaacatgcaccttgggttca

SEQ ID NO: 2973 - DNA, 107 bp, Homo sapiens
  misc_feature (1)...(107): n = A,T,C or G
actgagggagacatccaggtaccaacctgccagaggagagagtgcacttaccgaataaaactcaagtgaaccccgagaaaaantntcaaaggtgggggggggggggt

SEQ ID NO: 2974 - DNA, 103 bp, Homo sapiens
  misc_feature (1)...(103): n = A,T,C or G
tttcatcctttcgcctnttttgttctactgagtgggtnnnccctgangtntaccngggcagagccataattncttctcgtggaactctcaaaggtcggacagg

SEQ ID NO: 2975 - DNA, 267 bp, Homo sapiens
  misc_feature (1)...(267): n = A,T,C or G
gatccctcggagctgaanaggatnagtcggttataagcctcctgacgtggatagctggcacggaaacnngggccntctggaaagaacnncaagttgttcttagctgctgggagtgtctctgcngcncccaaggagggancctgngcngatngganaagcagtnnngaggattctacagtcaantcnttggatgaagtgtatgcccatgcagngccccagtcctagcctgtatgtcnccaggctcttcattccttcctggtcccccaa

SEQ ID NO: 2976 - DNA, 357 bp, Homo sapiens
  misc_feature (1)...(357): n = A,T,C or G
taactgaggggatcttacagaaggctgagacactgtacaccatgggagactntgagtttgccctggtagttctatcatcgaggctacaaactgagacctgatcgggaattcanagtaggaattcanaaggnccaggaagccatcagcanctcggtgggaagtccttnttnaatcaagctggagaacaaaggcgacctctccttcttaagcaagcaagctgagagtaagaaagcccaacagaagcatctgcctataaagcaactctcgtacagcaccaagcatgaaatcaagcggaagggctcgctcaagagcgagaanaccgtgcggcagctgctcggggagctgtacgtggacaag

SEQ ID NO: 2977 - DNA, 155 bp, Homo sapiens
  misc_feature (1)...(155): n = A,T,C or G
aactctcaaaggcccgncgggaagcngctgtgacacaaaanaaagccagcctggcctacgttgacaaacctcattttgggaaagtgaaatactttgtcanttaacatgcacgttgggtcaataaanacttttggaaagngtcaaaaaaattaaaa

SEQ ID NO: 2978 - DNA, 107 bp, Homo sapiens
  misc_feature (1)...(107): n = A,T,C or G
gcctggcctacattgagaaacctcattttgggaaagtgaaatactttgtcaattaacatgcanttggntcaataaagacttttggaaagtgtccaaccaaaaaaaaa

SEQ ID NO: 2979 - DNA, 274 bp, Homo sapiens
  misc_feature (1)...(274): n = A,T,C or G
atgttttctataccaacactactgaactggactgctggtntattnatgaaggggttgctgctcctgacttctatnaactgaactgntgatttcctgacaatacagaacgggattntgcttcaaagaaaaatttctaaacnggatncntttgaccatttaaggncntgncnngacacnattcccagccctgagngggggatttgntcggaccctttcnaagaanaactcttgtnacaanaagatgtngattcttgganacctggccaaagaaacc

SEQ ID NO: 2980 - DNA, 167 bp, Homo sapiens
  misc_feature (1)...(167): n = A,T,C or G
cgtttcctttattcctcctcctcttntcaggntttcttcngnnttcncctctangccacccccccgntncacaccantgaagnggctttgggctgaagtanancctgggcagcaggccataattacttcttgtggaactctcaaaggttcggacaggaaaaaaaaaa

SEQ ID NO: 2981 - DNA, 454 bp, Homo sapiens
  misc_feature (1)...(454): n = A,T,C or G
actgaggccaaggaggtaacttgtatgcttctgctccatanagtngaanattggttgggactnactcagcattttancnctncattggnngntttgttanngggtncccagacccncatncncngttnctaagaangggtcagtgaagnatgggnaggcctnantnacgangtggcgnntaccctacnctttttgattactcngtnaggaagcatggcnctacnttgcaaaacacatngnttgtatttaacacntntgtctccccattttcccctgcccttttacatttgggctttgttatagggttggccgcccgccaggncagaccagaccaggcnggccagttcctttggcnaacgaaagggcatcgaaanactnaanccatgatcccacttttttcccccttgggcnggggggccttnccaacgggggggctnaaccaaaatagggccct

SEQ ID NO: 2982 - DNA, 162 bp, Homo sapiens
  misc_feature (1)...(162): n = A,T,C or G
acactgaggttctaantgnaaaatctgacatcaatggcaccatttggaaaaactagtgacactgtactttattttgttatcaagaataaagagtgattggagctcttgggcagagagagaggaccctgctcngcccagggcatcgttaactttccaacactg

SEQ ID NO: 2983 - DNA, 340 bp, Homo sapiens
  misc_feature (1)...(340): n = A,T,C or G
tgagtagcaacccgcgccatggagcaggnctggnngtgggccccagcgcnccccgcccgggcccntgccccactgncgggccnggcggcggaaccgaggtgatccaggtgaccaacgngtctccnagcgccaacttcaaagcanatgcnnacgcttttcngcttccttggcaagatngacaaactgtnccnnttcccgccggtatgactaacctttggcaggctcctttcgggngtgctttnttaanantccatgaatncatacttaanagggtgggggcncaagcattntttgaccaaaccaacgtgnnggtttccgatgggncagaaaactttttgga

SEQ ID NO: 2984 - DNA, 112 bp, Homo sapiens
  misc_feature (1)...(112): n = A,T,C or G
gaggccataattacttcttgaggaactctcaaaggnncggtacaggaatccntgaggaacaccaaaaatgaggcccccgngaataacctccacaacccttgtcggcccttca

SEQ ID NO: 2985 - DNA, 212 bp, Homo sapiens
  misc_feature (1)...(212): n = A,T,C or G
caggggtgtgagtgagatacgagctgnncctgntgacctgtgaactgngctgccgatttccagacaacatagacaggaatngctccaaagaacctttctaaacaggtccattcaccctctctcttccatatcctttctttcccactacctttggtgggtgctgggctacaaggaaggttaaagcatttaagaaccactattaaaaataattt

SEQ ID NO: 2986 - DNA, 193 bp, Homo sapiens
  misc_feature (1)...(193): n = A,T,C or G
tggctcatgcctggtgtctagcctgccgagaggacgggtctgcngcctgctgggtcatattnggngattgctacagggctgnactgctgcccaagangatcaagcttgcccccaaagaactactgatgaacagctccacttccctcataacctaaaatcttttctttcctactcactctgctgagtggtgggc

SEQ ID NO: 2987 - DNA, 189 bp, Homo sapiens
  misc_feature (1)...(189): n = A,T,C or G
gcccgaccttttactttanctaccaaataataggatcaggtggaaagcnctgccctggtttctgtccctgtggggtttgcttctgatgggctgtggcctgngcctggccantaccaagtgcctacaggccagnngcttacactggcaacacaagntgcttccccagtggatctgggagagggttccttg

SEQ ID NO: 2988 - DNA, 205 bp, Homo sapiens
  misc_feature (1)...(205): n = A,T,C or G
atgagcgctactttgancaacncaaggaggctnccttcttnaaanaaactggttcggtccnttattaccaacgttcggaagaacctaaccttncacacactcanccaggaatccctcctgaaggantncntccaaccattcttccngangctncactgccttgacagccacatgactgcctttaccccatggaggctcctgggct

SEQ ID NO: 2989 - DNA, 177 bp, Homo sapiens
  misc_feature (1)...(177): n = A,T,C or G
acagctcttctttagaggaancaggaggaatatgtggtggaaaaggttgttggacaggccgcntggtattaggggcnaaagnngggaatatctngtncnaacgtggaataggctttttgnttgagggagcaccaattaactatggtgaaacnctnagganaggaaactttggaattg

SEQ ID NO: 2990 - DNA, 335 bp, Homo sapiens
  misc_feature (1)...(335): n = A,T,C or G
cactgaggtgcgggaggaactaagaagctcaactgangctcgcttccgnnagntgctgggcacggacccccacgcacgtggacggtcaccagnacgngcatntgcttncangcgtgtgnnaagtgttcnccgaggcgctgnaggcgnacggggtccgnttcanacggctgncggcagaacgtggcgtgggcagctgcgcgtggctcgaancaccaaangcgcgccttcgcctgcacggtggagcgcgatgcccggnccgcaattggccccttctntcgccacggcctgcggtgaacataagcctttncaactacatacaaccctgccacgtccta

SEQ ID NO: 2991 - DNA, 304 bp, Homo sapiens
  misc_feature (1)...(304): n = A,T,C or G
gcaggtttatggggggcncaaaggacatgattatgtgtatgaccnttccataagagngngatttacactggctggtntgatggcagcatccaggctgtgaggctcaatntgatgcccaaattaccgctgttggggggatggctggncctctgatntttgggcgttgggggatcactttgaaaacaaaccacttgcttgacnggaccnccccaatccccaanttttcaaaaacctttaannggncnaatggggggaactggggangccctttttttttacngcccgggnaagggattccaacccc

SEQ ID NO: 2992 - DNA, 190 bp, Homo sapiens
  misc_feature (1)...(190): n = A,T,C or G
caccagcaaagaacacactgngctctggggagaagggcagattncgcttcgtctgccgnggttccaggacactcttcaaaagcgcctgttnacacgcncactctgaatacacnaagactcttcctgccaccactntggaagcgggctccctanaagtctatnaaatatgaatggacccatgacccataaa

SEQ ID NO: 2993 - DNA, 488 bp, Homo sapiens
  misc_feature (1)...(488): n = A,T,C or G
ttaacaaaatggactaatcgatcccgtngataganctggncagatcttaagccaattctngtacccttgtcaccccncacatgggacattaagagaagcatggggccngcatcattnaacgcgcncaagccaactgncagcacacaaactactgaggatgcanggctgcttgacctccactagatgggccctctgtgccttcactccntgaggcttggggacagagaatccccccttcccttctntgnagcacctcccctacacacctgcctacatcatggaactgccttaggccgacatcattctatgcttacgccacaaacagacccccaagactgnaggaagaaaccaaacctttgatgattgaaccactcccctgtgtaggngncattggtgacataatantacacgccttgggccgngcctctggncatcaanccactnccctacaaaaggacaacacacactcatttaaaaagtgaggtgga

SEQ ID NO: 2994 - DNA, 179 bp, Homo sapiens
  misc_feature (1)...(179): n = A,T,C or G
aaactggctgtggggaaactctatgacatcgatgtnnncaaagtcaataccctnntagacgcccnacggacagaagaacgcggtatgttcgctnggctccctttatgangccctaaatgttgccaacaaacatnggnntcatctaancatgattncagatggctaaactctaaacttat

SEQ ID NO: 2995 - DNA, 216 bp, Homo sapiens
  misc_feature (1)...(216): n = A,T,C or G
gactgagagactctaaaacaacagacagcaggccggtggaagctctgactgcagagggtgcatgctccttctgaggnttgggagctgctcatctatctgactttggcggngattacacgggtatgtacacttgtcaaacttattactgtacatgcaaaggaagtttagttcattacatggcaaattatacctcaataaagttgactttatcccatt

SEQ ID NO: 2996 - DNA, 337 bp, Homo sapiens
  misc_feature (1)...(337): n = A,T,C or G
caggaggtcctgcttggnacacctgctgccnagagatgatctattgngaagtacttgatttgctcaaatgaagntatcctcattatggtccaangcctttgncatcaatgtggccnttgctttgnatgctgatacantgtngaccntatctggattctaatgacaagtgtnccaaacagtatcatcctgnatgnacaactatcgganaaacttattgccatnaangtactttctgcaangcactganacttggtacaatgccttcctctctattatggaacaaaatcactttcatccnggccttggtggnccccttttactatggaactacttttgc

SEQ ID NO: 2997 - DNA, 152 bp, Homo sapiens
  misc_feature (1)...(152): n = A,T,C or G
ctgcaaaggtctgggtaaaggncctgtcttngaagtncnagtnagatcnacaccctggtggtcacaactcctaatgaaatctgtncttttggagtgctgaagacagctcagtgtcttacatataataaataataaatctttaaaaaaaaaaa

SEQ ID NO: 2998 - DNA, 117 bp, Homo sapiens
  misc_feature (1)...(117): n = A,T,C or G
gacaaataaaaacaagcnagncagattaaggncagcctggcctacnttagagaaacctcattttgggaaagtgaaatactttgtcaattaacatgcagttggttcaataaagacttt

SEQ ID NO: 2999 - DNA, 200 bp, Homo sapiens
actgagggaccagaggtgaagatgacttcagttatgcagatctacttcacgaatagggatcttcttgatgttcccaaactccccttgggcctgaaaaggcctaggtttctcttttcccaagttaaggatggcggcctcgggccttacctcctgttaccttgttacctttaaaataaaggtgcccaggaaagagaaaaaaa

SEQ ID NO: 3000 - DNA, 102 bp, Homo sapiens
  misc_feature (1)...(102): n = A,T,C or G
cccgtttaaaaccccactnaagncggtttggtctggggtanancctgggcancannccataattacttnttgnggaactctcaaaggtcggacaggcaatta

SEQ ID NO: 3001 - DNA, 125 bp, Homo sapiens
aggacccacacaacagaaaagaaccaactcctgaaagttgtcctctgacttctactcatatactgtgacctgcatgggcacgcatgtctgtataccgtgtacacacacatacaaaataaataaaa

SEQ ID NO: 3002 - DNA, 112 bp, Homo sapiens
  misc_feature (1)...(112): n = A,T,C or G
gggttttttagggggggaccactnattaaanttctctgaggnagatcctgggcacaaggccataattacttcttgnggaactctcaaaggnccggacaggaaccatgggtgg

SEQ ID NO: 3003 - DNA, 217 bp, Homo sapiens
  misc_feature (1)...(217): n = A,T,C or G
tttgacagatcccaaccgtgcccgcttcnctctgcnagagctgagggaggcgctgctggaacnnaacaaagcncaagncgcaactgctgctggtgcaaagaggaactgcngngctncaaagaagtggtctacttccacccactnganactccagggagggaagananaataganggnatgcctgntggntncctntgggccaacgagcgagaaaggg

SEQ ID NO: 3004 - DNA, 111 bp, Homo sapiens
  misc_feature (1)...(111): n = A,T,C or G
ccccgaagccaacagacatggtgcgaaaaggcaaagacccccattantacagacctactggnctgnctgcaaatacngagangtcctcctnttatttcaaaaagctctgct

SEQ ID NO: 3005 - DNA, 202 bp, Homo sapiens
  misc_feature (1)...(202): n = A,T,C or G
atcgggcgatatagttangacttccgangacangtagatgctggggcgncgncctccntcgcaatgcntnctcagccattgncgtggggaatggttttgtggtgctcncaggccggccatgtnnncatcgtcgagatntctactnacnaatactggcgnncatggccttnccaagngtccatctggttggcattgacgtttt

SEQ ID NO: 3006 - DNA, 187 bp, Homo sapiens
  misc_feature (1)...(187): n = A,T,C or G
aactgagtgagctcgcctcaagctcttttgctgcagaaatgcacggaaaatatgangaggatcctgaaagaattctctggcagagagcacatcttgttttcggccggcatttgttcgtcgtcgtcgtcgtcactacctacattcccccgccgtgttcacatatgaaaacaattatttctcagttcag

SEQ ID NO: 3007 - DNA, 403 bp, Homo sapiens; identical to SEQ ID NO: 21
  misc_feature (1)...(403): n = A,T,C or G

SEQ ID NO: 3008 - DNA, 405 bp, Homo sapiens
actgaggggacctggctgacacctggacttctcatcgcttacctcctcagccagagggcccaagctcaacaagccttgggctctaaagactcccactcttggagagagactgagctgtactgaagcccacagctcctctctctgggatgaagttactaaactccgatcccagcttcaggctcaggctcaggtgactgaggcgctgaagcattctgtacagagcctgttgaaggatcgggagcaacatatgttcaagatcagtgctctagaagcatcactaaaactgctgcaggagggccccaaagggagagcccttctggagcaatgcctggaagggctgaaaaaggaactgcagggccttcggagtcagggtcaagaactagtcccaaacccaatggaaggcag

SEQ ID NO: 3009 - DNA, 590 bp, Homo sapiens
  misc_feature (1)...(590): n = A,T,C or G
gtttcagcaaggtggtaccanccccggaggctaagcccgctccttctctgaacagacccaaaaccccacctccagccccagtccctattcctgtgcgagtgagccctactcccctgcagccaccactcctcacccaggctgcagtgtgcccagccctgatgccatccccagctcccgccctctctggaatagggagtgccaaagcccccgtgaggagcgtcgtgactganacggtcagcacttatgtgatccgtgatgagtggggcaatcagatctggatctgtccagggtgcaacaagcctgatgacgggagcccgatgattggctgtgacgactgtgacgattggtaccactggccctgtgtgggaatcatggctgctcctccagaanagatgcagtggttctgcccgaagtgtgccaacaagataaagaaagacaagaagcacaagaagaggaagcaccgtgcgcactgacatcancgtgggcaggactgctgccctgcnccgggtcggggctgggctggttctgccatcctgtctcccccgggccctgtggacttgcancgcattccanaggaacaaggacaatat

SEQ ID NO: 3010 - DNA, 412 bp, Homo sapiens
ttaccaatctgaatggccacaccgctcgagtcaactgcctgcagtggatacagtacagaggatggctccccttccaatgagctggtgtctggaggatctgacaatcgggtgattcattgggaactagagaataatcaggttttaaaatcagtccgtctccaaggccatgaaggacctgtttgtgctgtgcacgctatttaccagagtgggccatccgaaggggagcagcatgcgctgatagcttctgcagcttcagattctactgtgcgaatctggtctaaaaaggggtctgaagtcaaataccttcagaccttgagcttcaaggatggattcgttcttttctgtctgctgctatttgcctggtactaatggtaagtgtcctgctatttattaaaagaacgcataaagttag

SEQ ID NO: 3011 - DNA, 164 bp, Homo sapiens
  misc_feature (1)...(164): n = A,T,C or G
agcctgggcacgaggccatnnntncntntnggggaactatcaaaggnncnncaggaagcatggctgagtncatatatganctgaaacaaagnatggccgngctggagatncatcgtgtgctccggcagacaggccagcctgaggacgaccaggcgtccacaaaa

SEQ ID NO: 3012 - DNA, 418 bp, Homo sapiens
  misc_feature (1)...(418): n = A,T,C or G
cacctggcctccctgaaggggtgtctactggaatggctactatgcagttcttacatagtggtgacttaccactggccaccctgacctctcctctgtgcttctggggttccctttcattggggtgaggaancaaggncaaggtcanagtgcctcttgaaggttctcccanatatgggaactggggcctcttccctggaaatgagggcagggacccagttccatcctggggtgtgtccccagatacagcctgggttaaagggcagggattcatggtgctgacccaggctctctgagaaggccctgtcattcctgtttgtgatgttctgaggatgcccatctgtaggtttttattttnaaancaagnctccnnccaccggccattttgcccactgctttntattttggttttatcctaaca

SEQ ID NO: 3013 - DNA, 390 bp, Homo sapiens; identical to SEQ ID NO: 22
  misc_feature (1)...(390): n = A,T,C or G

SEQ ID NO: 3014 - DNA, 435 bp, Homo sapiens
  misc_feature (1)...(435): n = A,T,C or G
actgagagtgaggatccatgacctccgcagcgataagatcgccctgtcgctgtctgcccatcaanctgggggtgtccgcagtccagatggatgactggaaggttgtcagtggaggcaaggaggggctggtgtctgtgtgggattaccgcatgaaccagaagctgtgggaagtgcactccaggcaccctgtgcgctatctctccttcaatagacacagcctcatcactgncaacgngccctacnanaaggngctgngaaactccgacctccacaactttgcctgtcacaggagacatngtggnctgatccatgcctatgaatttgctgnggaccagctggnctttcagagcccccttcctgtctgccgcttaccccgtgacatcatggctggatacaagctatgacctcgcactgtcttttccccatgaaaagata

SEQ ID NO: 3015 - DNA, 304 bp, Homo sapiens
  misc_feature (1)...(304): n = A,T,C or G
gaggtctggggagtttcaaaggacatgctctccctgggagtttcttcttcnccntgggcttttgggggactatgaagaacatcctgaaatctgtctacaaaaggcaaactcgaacctgctaccttaactctaaaacattattaccgtcggacagagatttgggaaggagttgtngtgcttttaatgncnctcactggnatagcnggtgaacagtttatctcaggaggacctgccttgatcttgcataaagatggccagnggaaccagatcctgggctggcatcacacaaccatgtacttattgg

SEQ ID NO: 3016 - DNA, 135 bp, Homo sapiens
  misc_feature (1)...(135): n = A,T,C or G
tcaacaagatgcacangctgatgtctaantnattgctgtcttnatcatancaacntggtcnacantagttacttaggaccncaggntgtttataaattancttacaataaacaacttacaatgagaaaaacaaaa

SEQ ID NO: 3017 - DNA, 640 bp, Homo sapiens
  misc_feature (1)...(640): n = A,T,C or G
aggctcccttatggaacttaagacagtccaggcagngcacgtccctgngaggtcgtccatgtcccgagaagagcagccgattcctggattgcgagagtcctgtgcacgtatttatgagcctgtccccaccgaaagcagtaatccttcaggccaagccatccaattttaaaccccgctgccttgttcatgttgggtatacagagactcagaggcgctagttaatggccagcctgacctgtcttccttgtgtttcggggggtgaaaggaggttccaggagaataatgccctggaatattctgaggctgaaatgttgngtctcggatagacagagtacttctccgtgggtcctcctgcacagaagcccccttctgctctgttgtcaatcactgggttagttttttgttatgtctgnttctgttgttctcttctttctgggttgatcttaatctttggaaatacacagtgctgctcaggtttgcctggttcccctgtgtgaccttcccccccacacacacacaaagttaaccagctgactgggagcaatgctcgnggaatgggccagtcacttgaaagacagaccttcaagccagcaatgggcaactggagcgagcacttaaagcgcacctttgatcttccctt

SEQ ID NO: 3018 - DNA, 469 bp, Homo sapiens
  misc_feature (1)...(469): n = A,T,C or G
aactctgttatggatccaacaacnacaccnttctaatggttaccgcagcacacagcccancaaccacagggtggtggaagccaatttcctgaacgtcccggatatgtactcttcgtaccacctttacctaaaaaacatgcagaaggagattctacaacctaagaaacagaagaaaacaaagaagaaccggcacttttggagccggaaatgacacactggccccagggctcaccctgccccttgtctaaggaatcctggaatgtgggtctccttgctgccttcagcgagtctctgattaacccagagggagttctcctccgagagaagaagtggagctacgttagccagaagagaaagggatgtgggtgagagggaaaagacttcgacggacgtgcaaagaaatcaagcctttcataattccctgtcaatcattcacctaaagntggggtccacagatgcagctcatggg

SEQ ID NO: 3019 - DNA, 418 bp, Homo sapiens
  misc_feature (1)...(418): n = A,T,C or G
ctggacagacgcctgccccaacaaagaanttgaaaagtagaaatcctatgacatgccatctctgctttggtacccagaagagagcttgagcctctccatggcttccaacgcttcggagagtccagggtcattctgagagcactccttggagttcttctgcctggnganccttnttgttgtaaagaactcacagnacgttatccaatccctgtngcccatcaaaaaccgtctgtgcctnatctttctttgacnctgantgaagaaccaggatctgatgacttctttccgtagtttgaagagaacaacttttgagagttggtnctctcctattctgtgngacccagggatgacactccaaccatcangcttgatagccgggcaccaaggtaacttnttgagccaccctgggtggggcctt

SEQ ID NO: 3020 - DNA, 447 bp, Homo sapiens
  misc_feature (1)...(447): n = A,T,C or G
gactaacctgttgctcaatgctagatacactatactgaggaatctttgagaagccaggaagaaaaataatagaatgagaagacctgaagactaaactgccttttcattcgggcgttggctgctagctaattgcactaaaccacactggagagcatatatacattcatataatgttcgagttttgattgttcttgttaatgtactttgttaggattaaatgtcaggattctgttcatactaggcaatttgaagaaaaagtgtttagcactgtttgcataaaagaacaaggagatgagcaagatgaaagctggtttcaatggggttattttaagaaaccagctattttcagaaatacatggtgtttttttcaatgntatagaagctgngtaatttaccntaatcccttaacctcttggaccccatacaagtgataagaaggttttatgc

SEQ ID NO: 3021 - DNA, 181 bp, Homo sapiens
  misc_feature (1)...(181): n = A,T,C or G
cccaacaggctgggccacagccaactgcactacttgagcatgggtgggctccagatctcctccttcaaactggagtgagcggcacctnagaagaccttacccccagaaccagcttnagccagcccttcancaagcccccaacagaaccggagcctttanggtctggggatttttcccaagg

SEQ ID NO: 3022 - DNA, 398 bp, Homo sapiens
  misc_feature (1)...(398): n = A,T,C or G
gatacaaggtgacacnaatatgacngacaaagtatttgtgacctgcnataccancgtcatgcatctanatggaacggtggaaggatggtttgcaaagaataaaacactcaacttgggcaaaggcnntctggacccacgaggnatatatcaagtgnantgggacatagcacntgncaaaagagatgtcnactgtgcaagtccnttaccgaatgngccagaactgtgngnagctagactngggnaccatggctgntgtaatnttcattgacctnatcgnaactctgctnctggctttnggcgactactgctttgcangacatgagaccggaaggccttnttgggcttgttaaggttaaagccctgctgaanattgagcagctgtatcagcctcttcgaga

SEQ ID NO: 3023 - DNA, 364 bp, Homo sapiens
gcaaaggagaccaacaacaagcaaaaagagtttgaagagactgcaaagactacccgtcagtcaattgagcagctggctgcctaatgctgagcctttgctgagataacttggacctgagtgacatgccacatctaagccacgcatcccagcttttccagccagggcctcctagcaggatcttagagaaggagacagtggtattttgaaactggatatcaaatatttttggttttgctttaaagtggctacctctctttggttttgtggctttgctctattgtgacgtggacttaagcaataaggaagtgatgaagggacagtgttctctgacaggacctgtgggggtcggggtgcctgtgcaagg

SEQ ID NO: 3024 - DNA, 113 bp, Homo sapiens
cagactgaggtggggtctttcagagagacttgatagcacacaccatggaggagctgtcggggctggagaagaatgtgagagcaccaaagaatcccacagtatcaaaaaaaaaa

SEQ ID NO: 3025 - DNA, 346 bp, Homo sapiens
  misc_feature (1)...(346): n = A,T,C or G
cagaactgacgatcaaaagatttgctgaacagtggactccgagatcggtannacgaagctcttcctgcccttcctgaccaggctgtcaggtaattcctgtgctcccctcactggtcgaagtgattttccttctcacttagtctgcccagaggctctgctttctctgctcagtgtgcatcttanggtggtggttggcaagtgagcctggctgagggaacacatagggggtcctgtctgtagtacacagacaaacacaatcaaaagtggggcaggagggaaggcagccctgctacctttctggggaatattttgaaaggttttggttaatattggaatctgcctgcag

SEQ ID NO: 3026 - DNA, 126 bp, Homo sapiens
gactgagctcccagcatcccaggaaacctagaaccatgatgatagacccaactgcaatcaagatattcacagcaatgaaggggttcgtgctagagtctcctgacgtgatgatctagaaaaaaaaaa

SEQ ID NO: 3027 - DNA, 275 bp, Homo sapiens
  misc_feature (1)...(275): n = A,T,C or G
acagcctcatgtccgactgctggtgcttcatnttctgcaaggaacacgttagaagcaatcctntgtcaccacagcatgatggggcctcaagggaggaggctgatcaccaggtggacgtgtctgatggcatcaggctggttccagacaaagcagaggccacggctgctacagcctcagntctcgggtcccaccagcaaagcttctgtgtgcagcgcgcacggcagttaccgcagaacctcatgagtggagagctcagcccgcagctgagacatctg

SEQ ID NO: 3028 - DNA, 401 bp, Homo sapiens
gaactgagagcctcaccagaaacttctgcgtcagctctcaggtgcatcctgggctaatggcaactcgtgctccattcccaactcatggggacaactcaggcagtgctggctggggcctcatgtgggcccttcttcagacaggaccctccaccccagtgcagcccaagcagcaagaccacattaacccttctcaagtacttttatttcacacctcctgtggggcttccttgtctccaggactgggtagagcctgagaagagagccagcctctaaagaacccaggctgtcaccggatgcactgattgttcctaaaggttccaagtccctggctccgtgcatttcacaggcacagtgggcagagctgtaagctacattcaggcttccctggcactcagggactt

SEQ ID NO: 3029 - DNA, 221 bp, Homo sapiens
ttgagcttctttgttgagactccataaagagaaatgcaccaagaaacttctggtggtgtgctgaggcttcttgccacttctgcagactcaggctgattgttagatgatgtcggctgaggcatgacccatggaggacccatgatgtttgaaaaaggactcaatggacaataaaagaggctgggcttggcttgctggtacagttaactgttcaaaaaaaaaaa

SEQ ID NO: 3030 - DNA, 200 bp, Homo sapiens
  misc_feature (1)...(200): n = A,T,C or G
aagcctgaggatgctgacctgggaccagaatggccagtgcccagtaatctgaagtttatagctaccaggggcgaggatgagggcaggattccagcgcctcctacgagcagggccatcanaaagaagaggcggcggcatctgctcacacacaacttcaggtaactagtgatacaacaataaacgtaaacggcttaaaaaaa

SEQ ID NO: 3031 - DNA, 377 bp, Homo sapiens
  misc_feature (1)...(377): n = A,T,C or G
gaggtgtcatgctaacctttgggaantttgatgtggagcctgacacgtactgccgatatgactntgtnagtgtgtttaacgganctgngagtgacgactctgngangctggggaaattttgcggagacaaggcccctagccccatctnttctgaanggaacgagctcctgggacacntngtatcggatctnatntgtnaccgcaaanggnttgtnancctcctacaggaccctgccacgggattgccgnagagaaggagtcntncctgagtncaggggaggacgtacagctntggtccccctgcccgctcttaccctnagtncaggaactgggccctannttctcaacctgcccnctaaaccttatattcccaacct

SEQ ID NO: 3032 - DNA, 323 bp, Homo sapiens
  misc_feature (1)...(323): n = A,T,C or G
aaggaacagaaccgatgtgtcctgtgaatccattgnccctngnaacaacaggagggnaantccctcctgaaacaganccaccggacccaccggatgactccagcaccacattctgaaaangaatctnntatgtgaatatcagganggactttttactccctgagggacttgangttgnaanncggntcttgcttanctgtanaaatggactgggatannggctctaggggnggactgtttacacacttcaggaatctaggggnacctgttccntgctaaaagaggctattcngaacnttggggcttggagtgccttgctgcga

SEQ ID NO: 3033 - DNA, 224 bp, Homo sapiens
  misc_feature (1)...(224): n = A,T,C or G
gcccagaagaccatggttgngagcagatgtgcgtgaacatgctgggttcctttgnctgccagtgntacngngnntacaccttgnctgangacgggaagcgatgtaccgctgcggactactgtgcctcagaaaatcatggatgtgaacacgagtgtgtaaatgctgaaagttcctacctgtgccggtgccacgagggatttgctcttaacagcgaaaaaaaaaaa

SEQ ID NO: 3034 - DNA, 207 bp, Homo sapiens
  misc_feature (1)...(207): n = A,T,C or G
ggaaaaccaatgttggaaaaatatcatagtttgnccaactgatggagaactggaaaatactctttttcatcaagtttttcagttcaccccgttttgttcatagtatgtaagaatggacatcggctttgatgatacatgctgtctgtcataatgtataatatttaatgattgaaattaactgtttggggatcctgacgctgaagtgtg

SEQ ID NO: 3035 - DNA, 298 bp, Homo sapiens
  misc_feature (1)...(298): n = A,T,C or G
agactgaggtggggtctttcnacacgcntgcgcgaggcccgncgncaggaatttgacacgttcatcgtntccncgacgacctttcacacgcatgagtccatcgcantccccgtcatcgaggaggacggggagagtgactcggactcggaagatgccgatctggaagatnctgncttgantgaagngtgcgcgtnctttggtccgcgtggtggcgcgntccttgagnntggccccggcngaacctggtntgcctttttgncttataccccatntnctgtttgctttccgaagacaagag

SEQ ID NO: 3036 - DNA, 109 bp, Homo sapiens
ctgaggtctcctatgctcagtcaactctcctaactgtaaatcaacactaagagcactagaaggttaaaggtcaaggagactctcacaaaggatccaggattctccttgt

SEQ ID NO: 3037 - DNA, 342 bp, Homo sapiens
  misc_feature (1)...(342): n = A,T,C or G
aactgaggcccagagaacactgaagacatacatccccagtgaagggcatcattacctacaaaggcggactgtggaccatacgacgagagaagcccatcatcatggatgtgtcccatcatttctatggcagtcccaggatctcactcttcttgatgctctactgtttgattgttcatcgttcacatacagaaatgacgctggtttcctgtgttgaccttgcaccctgctactgtcatcactggcctggaagtcagcagtatagataaggctggccctgaattcaaganactcacctgtttttgcctactcagagttactggaattaaaggcataacaacacta

SEQ ID NO: 3038 - DNA, 137 bp, Homo sapiens
aactgaggcaaatgaccatggaaacagttgaatcacaagcaggatcgaagtgtaacacagttctgtggcagagcatagctctgctcatatgcagactggtcaaatttctgttcctactctagctcaggtaggccata

SEQ ID NO: 3039 - DNA, 429 bp, Homo sapiens
  misc_feature (1)...(429): n = A,T,C or G
gagaaagcggcgtaccgccttctgtatcacggatgcagccctgtnctgctggagccancatgcntgagcttcacgtcnagtgcttaagatcttgtgnnnnncccnagcaaagatnggactcgaacacancnganatnancttatcatacttnaagagagcagnatggcaggatnacttcngaggagcacatgcctttaaacagtgccaccgcannatacngtgaaagctacgcctctgganccgtgngcngcaagtaaagagactcaccggggacattcgttatttctgaacgcatnttatacacacattcccagcttaatcacttttagaactttaacatgaaccagagtcaaatgctcttgagagagagaaaganccngagagacttcttttttggaaggnnnataaaaagcttttaaactcattgg

SEQ ID NO: 3040 - DNA, 190 bp, Homo sapiens
  misc_feature (1)...(190): n = A,T,C or G
acttcaagtttgggaaaatnnttggngagggctctttttcaacaaaagagtatgagcctntgntgctgttgcttgttgagcacagggttctcttgggatcatagactactgagaacacctgactaggcaatggtttccctgtgcccctgtggttgtctgctgctgngcattgccactagagtcttgggaa

SEQ ID NO: 3041 - DNA, 260 bp, Homo sapiens
  misc_feature (1)...(260): n = A,T,C or G
gaccacaagattgcagtattttacgttgctgaaggacaaagaagataaatactccattctcaccaatataggaggaagccaagcatatgaagattttgtagctggccttggttgggaggtaaaccttacaaaccactgnggcttcatgggaggccttcagaagacagaagcactggactgaccactccctattttgctacctcgacagtagaagtaatatttcatgtatctacacgaatgccttctgattctgatgactc

SEQ ID NO: 3042 - DNA, 168 bp, Homo sapiens
  misc_feature (1)...(168): n = A,T,C or G
caccaccaccaccgtctccaccangtggcagaccccgcgcccccagagccagaggangactnctggacgtcagataatgaggagcaggaggacccnatcngataactgcanaggnngntatnatccacacgaaaattggagatntcttncatggtcagacctcatgtc

SEQ ID NO: 3043 - DNA, 120 bp, Homo sapiens
  misc_feature (1)...(120): n = A,T,C or G
tgtgccagctccacagccagcggcccgagagagangttatnattgccccggaagtcaactgaaangaactggcccccttgannnttcccnaaanacctggcacccactttccagcccgga

SEQ ID NO: 3044 - DNA, 321 bp, Homo sapiens
  misc_feature (1)...(321): n = A,T,C or G
aaaaaacagttccgttgcccnntgtgtganaagatattcatgagggagtgacttntctcaccaagcatgcccggggtcaaccgagttnttcccagtntgnatcaaaaagatcaaaaaggggtttttgccccccctttgnggggngctccccatggcacccaggcaaanatggntccccggaaggaaananntcccaggaaaaangantgacncntggaaatttgccccaaaaaaggccccctggccaaagnaggncacttgttttttggccaaatattcngatatctccctgccntgttccaaaaaagcacattggtcccc

SEQ ID NO: 3045 - DNA, 247 bp, Homo sapiens
  misc_feature (1)...(247): n = A,T,C or G
gttttttttttttttttaagggggggggggttaaaacactaccttgctccttgctncnatggnaattcacggncttgccaatatanttgntgntgngnccccnagtgccntccgaganaatgacatnaagagcttctttggtcgcaaagtggccatngatgcntncatgaacattctaccaatttcctgattgctgttcntcaggggggggatgngctgcaaancnaggngggtgaaaccaccaccc

SEQ ID NO: 3046 - DNA, 171 bp, Homo sapiens
  misc_feature (1)...(171): n = A,T,C or G
ccaaggatcatgcatcatgtnctattgacccaagagttggggncngtggnggcntccnnaangggctgtgtgttctgcaagaantnggagccngcttccaaggaggatgnggncctggaangggacttncggagccaaacggctgangaacgctattaccctgaccccact

SEQ ID NO: 3047 - DNA, 335 bp, Homo sapiens
  misc_feature (1)...(335): n = A,T,C or G
cactgaggctaggganggnaagagggtgggcgatgtggntggagcccaggcctacgcctccactgccaagngcctgaatatcagctccctgatcttcagcatccttatggtcattatctgcatcattattttctctaccacctctgtggtagtctttcagtcttttgcacaaagaacaccccattctggattctagctgccctgtgctccacggtccacatctgccccgcccctgccccgcccccaggctcaagcctcgaccctttaccctacgcgtatgcaaatgttaccttcacctatctgtccacagnggattcaataaagtgcacggggtc

SEQ ID NO: 3048 - DNA, 312 bp, Homo sapiens
  misc_feature (1)...(312): n = A,T,C or G
ctactgctcaaacaaggnaagctngaccgaaccaaaanacgatttcaagacantgctcaaatctaaccccancgnncaggaggagaaggaagccgagtctcacttgnaaaanctgaccagatgcagcggctgcgctcccaaacgctcgacncctttgacggngccgaatacactgctgctataacccttccttgataanaatttaaaagtttggnttttgggatgcanaactgcctgaactgggaagcagaatgcttntnaaaggaaggaagagcccaggaaaaccntnaaccgacttaaaaggctggtttc

SEQ ID NO: 3049 - DNA, 412 bp, Homo sapiens
  misc_feature (1)...(412): n = A,T,C or G
acagtcagatgggctcttcnctctccctggcctggaccagctccctgctgctgntgctgggaggcatcctgctctgtgtcnacatccnagtatgcagagactttccccgttgcattgagacccctagngctagaccttcaggagccaacaacgataccttanatgtttgatggccagcacactcacgtctggaggggaaaacttnctcaagaggcctctctccaggttctagaatcattgaactggagggaggaaagacaggtctacggagctgcccacaagctgtgtagtggactctggatgcggctagctgtgtcagcaccatgctgaggtgggcttcttggtgctgaagctgccnagncttctaatntaagggaccccaataaagtcattgttcccctaaaaaaaaaaa

SEQ ID NO: 3050 - DNA, 389 bp, Homo sapiens
ggaagtgacagcgagtacgaagtggacacgaacacccagaaagcccactcctttgtcaaccattacatcagtgaccccacatattacaactcttggcggcgccaacagaaaggcatctctcgggcccaggcctacagctacacagagagtgattccggcgaacctgaccacgtcactgtccccaacagcaacagcacccagcaaggcagcctcttccggcccaaggccagccggactccaacgccccaaaaccccccgaatccccagagtcagcagagcaccctctaccgtccccccagcagcctcgcccctggctctcgggcacccatagctgggttctcatccttcgtttgacatcaaaagaggagaaagaatggggagaaaaaaga

SEQ ID NO: 3051 - DNA, 272 bp, Homo sapiens
  misc_feature (1)...(272): n = A,T,C or G
gaaggacacatgccgagtnggatggcnganactccctgagcaattatnatganngccgagggggcccgagcaacntttacagtgggtcctctgccancattaaggccgcttatttcnnccggttaccgccctaatctcnnggatcgancttcnanatgccncgggggccnnggaccatcctgggctactaaccttgacggacctgnangcncnanangatagtttgttgatgcatncaatagtatatgccntcctgtacagtccttatctcg

SEQ ID NO: 3052 - DNA, 156 bp, Homo sapiens
gcttgctgctcgagatgtgagtcttcagatgttcctgccgccatatctgacagctgctgccaagattccctggtgggatggactcttatacctcaacaaccagaagcccaagtaaactcttctataaattgaatgactcatgcttaaaaaaaaaaa

SEQ ID NO: 3053 - DNA, 433 bp, Homo sapiens
  misc_feature (1)...(433): n = A,T,C or G
gaattgggcgcccccaggctgtgaaaaactagggaagtgtctgacacctnctgagtctgtccctgagaagngtttctgggcccattagccaagaccagaatctccagccagccctgcaagtgcctgggagaccttgtccttcggactgatgaatggaagagaccagntgccctctgcccacccatccctgcatggacggcccctgcaaccaggtgcaaggctccaagactgctcatcctggagccctgaccctgtagtccgctctcgagcaccacagcccatcttgccaactggttcctgaaaaggaagccggggccttgatcaccgtaggtacgccagcccagggtctgaagcactgtcactgtccctgcatacatttcaacctangtgccgtacacaaaagtgaagatttcagcgaaatgccaaggaagtg

SEQ ID NO: 3054 - DNA, 216 bp, Homo sapiens
ggatccagacttgccttataaattcttgaaggcaaagaaggattgaaacaaccaccagagatgtctgagccacttgttgagaatgaaaaacagcgtatgtacagtaagcttgcacacagaaggagggccggtgactactttcgggtttaatttttgatacaactttctattcagtatgtaatgaataataaagaaaactttgtcctgtaaaaaaaa

SEQ ID NO: 3055 - DNA, 270 bp, Homo sapiens
  misc_feature (1)...(270): n = A,T,C or G
gagcctggacctggctgtggccctagagcccaacgcctccttactgaanaangccctgcaagcagcgctnagacatgtgacccactgaccatacacaaggacacaccgacctgactgcttgtctcataacacacagccatctcaggagtnanctgcctntgcccaacaccccatgctctgcaggggccatattgactncacaaggagcaganaggaggccttgggtaccactnctgacaacatcangatacaggggctgtggaggatgag

SEQ ID NO: 3056 - DNA, 474 bp, Homo sapiens
  misc_feature (1)...(474): n = A,T,C or G
ggcagctgatggcaccggagccgctagagaagctcggctttagagacctaatggaagggaagccagaggcaaaggatgaatgttgagaagggagccacaggaccttgtccccagcctggagcagagctgagcccttctgcccacagtgcagggggacctgacactcagcccgtgctgccccgtgcaggggctctccctggggactttagaacatggctcacccctgcagcacacaccgaaatgtttcctctgttgacctcggttcccctctagagagtgtgtttttcttccgtctgtgtgtcacaggacccgtcaggactgaaccctgctgtgatttgatatcccgcccagagtggctgtcacaccacagagccctggccagcattccacagcgactcancctgtcacagatctgagtcctnacactggaacctgtaatgaaaccaancgacaggaaaatgtccgcttttggct

SEQ ID NO: 3057 - DNA, 266 bp, Homo sapiens
  misc_feature (1)...(266): n = A,T,C or G
gacacacagagaacagggctgtgcccattagacagaagagatttggtcatcacgctcctgggagacagacagaagacttgaagttcancaatccccctgcctctgcaagccccatctatcctaacactgtaccccgtggctgtgatctgaggatgacaagatccgagacatccttgggcagcttcacactgagatagaaataaacccaaatgaactatgaaatggggccataaataaagcctggaattgaattctaaaaaaaaaaa

SEQ ID NO: 3058 - DNA, 342 bp, Homo sapiens
  misc_feature (1)...(342): n = A,T,C or G
gcaagcccggcacgtccgagcagcacgagaagcgtncattgacaggaccggagaaggcttccatggactctgacactgtaaagttggtcaagccccacaaagaggccatggtcgccgacctggatgcgggcccagggatgctcgaaccctgtgtgctgccctcagccaaggaaagatctcctgtgcgtgatcaagagagccgttcgaatcgtgacagccgtgacagccgttctctgatgaccctagttcactcagtctctatgttcatgttctccatgctacagtccggctggcgactatgtaggtggaagtgntnaatnanngctggctcatacttctacc

SEQ ID NO: 3059 - DNA, 199 bp, Homo sapiens
  misc_feature (1)...(199): n = A,T,C or G
acaaagccacccaccctctgacttctatttactttacaatgatgttagccccccccccttncagaatnagnnaaatgggggnttngggtnaaagaacngnangannggagtctggacgatcagcnntccctgcaggtgaagaagactcatgaactcaccaatcctgganttgccgaagtcaccatgcggccagaccaca

SEQ ID NO: 3060 - DNA, 380 bp, Homo sapiens
  misc_feature (1)...(380): n = A,T,C or G
ctccttcacgggtcttccatccccctccncttgcccgccgggtactcctctctaaagncgcctgtacccgctggggttcccaagggtaacagtaaccctctcagtcaatagncagcgnaacagnaagtccctcaatggtgggagnatgnagnactcccatcctanctttggcctctcaggnaagtaaaaactggnatccagcaccagggnaattagctccgaccacccccttgttcttccgatgctgtgtctacggnacttggccacagcaggcctgtgggtggattcctggtgctaccacctgccgnaccaaaagccggatcaagggattggaacttggttgccattctcancaggccganaccgtggaggctgtttga

SEQ ID NO: 3061 - DNA, 243 bp, Homo sapiens
  misc_feature (1)...(243): n = A,T,C or G
cagattccttagggagcatttgcctccatatgaataagtntaccatnacngtggnaagccnaattacaggacacattaaaggaatgctgcttactggctggctttctgcttctgctcatcttgcctgtacagnctaagnccgaatgccatggtggaactgccatggtgnncttggccctcctnaccaattaatantaacagttattagtagtattataatgaacaccccataaacatgcccat

SEQ ID NO: 3062 - DNA, 193 bp, Homo sapiens
  misc_feature (1)...(193): n = A,T,C or G
cgtggctgctgaccaggnccncaggcttctaaactggccggccctggagagattcggccacttganctagctganagctgtgnacatggccctgtatgttgcggaacaagangactgggnaatgcatctcacatggccncgggcnnatncntacacatnctggaaggaaacttgctcaaaactagtggaccct

SEQ ID NO: 3063 - DNA, 152 bp, Homo sapiens
  misc_feature (1)...(152): n = A,T,C or G
gcttagagcacgacctaaanaactacttctaaacaggtccacacacgcccttgncctagtacccgtatctctccnctacgctctgntgnngctctanaagggagatngntgcattnaagaaccccaaataaaataggctttgaaaaatcaaa

SEQ ID NO: 3064 - DNA, 492 bp, Homo sapiens
  misc_feature (1)...(492): n = A,T,C or G
acactgagacttttcagaaaagaagatggaccagcctagtgggagaagtttcatgcaagtattgtgtgaaaaatacagtcctgaaaacttcccttaccgccgtggccctggggtgggagtccatgtcccagccactccccagggctcgcctatgaaagatcgcctcaacctcccgagcgtgctcgtgttgaacagctgcggcattacctgcgcgggagatgaaagagaaatcgcagccttctgtgctcacgtgtcaaaaactcgatctttctgacaacaagctccaaaactggcatgaggtcagtaagattgngtcaaatgntcctcaactggagtttctaaacctgagttccaatcctctgagtctgtcanttctanaaaaaaaatggctgggtccttntntggggttcgcaaacttgtcctnaacaacagnaaangcattatgggaaacagtgcacaccatactgcaggagttgccaaagttggaggact

SEQ ID NO: 3065 - DNA, 456 bp, Homo sapiens; identical to SEQ ID NO: 23
  misc_feature (1)...(456): n = A,T,C or G

SEQ ID NO: 3066 - DNA, 162 bp, Homo sapiens
gactgagtgaggaaaacatttggaagctctgtgagtacatcaagacacacaaccagtatctgttggaggagtgctatgcagtcttcatatcaaatgagaagaagatggtacctatttggaaacagcaggcaagacctgagaatggacctgtgatctgggaat

SEQ ID NO: 3067 - DNA, 406 bp, Homo sapiens
  misc_feature (1)...(406): n = A,T,C or G
agactgagtatttggaaatgaaccttggactttaagaacgcttggagtcattgaaccacacccaactcctattctgacatttcactgctatccaggatttacagaaaatgttagaaaaactctgcagcaatgttattttgaaatttataaagcctttacaaaaatgtgaagaaagatgtatatatttgtggcatcttgatctctactataaattgcgaaatgattggattgagcttaaggtattaaagcttttaattagaaaattttaaataaatgatgttctggatatgtcatgcatgtaactttggagaaaaatgtcaactacgtgtaacaccccctgacttgccattatacctattatggattcaaaggaatttaatacacctgnctaggttaaaaaaaaaaa

SEQ ID NO: 3068 - DNA, 174 bp, Homo sapiens
  misc_feature (1)...(174): n = A,T,C or G
aagtatttatttcatgtctatgcacgttctgcccatgttcacgtgcatgcctggtgctggaggatcanacgaaggngttggatctggcgttaaagagggttgcaagctccaggaatggancctggatcttcaggagaaacagaaagagctcttaaagaatcccaaaaaaaaaaa

SEQ ID NO: 3069 - DNA, 323 bp, Homo sapiens
  misc_feature (1)...(323): n = A,T,C or G
gaagagtattccctcnnagctaggagactgtganaatctagagagactggactgntctgggaatctggacctgatggatctcccctttgaattaagnnatttgaagcaagttacatttgtggatatctctgcgaacaagttctccagcgttcctatctgtgtcctgcggatgtgtcgcctgcagtggctggatatcagcagcaacaatctgagtgacctgccacaagatatanacaggntgctacngnnattngnangcctgctgtantanaacaatcngagctnctnnnnaccagcctgcttacctttctgaagccaagctt

SEQ ID NO: 3070 - DNA, 392 bp, Homo sapiens
  misc_feature (1)...(392): n = A,T,C or G
cagtgctactaccttcagactaagcattcaagcctatgagcccttggggcaattcttattccaaccacagcacatggtgagaaaggtaaaacaacaggaacataagcagctggtcacgtttcttctacagtcaggaagcagaagatggatgaatagctggtctcagggtattctctgatactgcagcatctcagtcaaacagatgcttccaactgcaatcaacagacctnctgaaatcaatttaattaatcaagataaattctacaaatcaacaagaggcttgcaaatcanatgattctagaactgatggtactaacaatggagatacaagaattacttcttgatctttgtacatataaaacacagttaattaaaaaatgtaaaaaaaaaaa

SEQ ID NO: 3071 - DNA, 164 bp, Homo sapiens
  misc_feature (1)...(164): n = A,T,C or G
acgaggaccacaaggcagaaaggagaactgaagaatccaaagccccagtgtacacacatctcttctgactcttccagcaagacggccctgttttccactattccaggatcagacngaggtcanaggtcaacttccaacccacttcctcatgtgcaccctgccct

SEQ ID NO: 3072 - DNA, 200 bp, Homo sapiens
  misc_feature (1)...(200): n = A,T,C or G
cgagattattgaggcgngnaatcggntgacgcttcccgttccttcataantggtgtgggcatctntccaanatgacccttgatcagnactcagagccnaactggagggnaganntgggctaanggcccaggctgactgcattaccnctnccttgannagacttatacgctatcantntanatataggaagagaaggcctt

SEQ ID NO: 3073 - DNA, 220 bp, Homo sapiens
acatggcacagccacctctgtataaatattggggccacacagctgcaaaggcatctcctgcaggaggacctaattgaggactgcttgagaccaaggattatttatgtaaacaatgtcagccaaactgctgttttggggaccaatggggcacgagtagagggtattaaaggagcttgcagcagttcagatgagcgtgctgctgaagtctcaaaaaaaaaaa

SEQ ID NO: 3074 - DNA, 150 bp, Homo sapiens
  misc_feature (1)...(150): n = A,T,C or G
aaccagcatatgtgggagacctgacaacccggcctgtgtggaggtntcacaagccaacgcccanccacaggggaccnactgttcctggnactggaangtgtgngatacggctcngtcttntacaatgctgagagagggtattaatacccc

SEQ ID NO: 3075 - DNA, 350 bp, Homo sapiens
cctcgtgatctggacaagccctatgctctccctgcattgtgggaccctgagtccatgcctgcgtctggaatgctgttggaagcctgttcgtgcctttttgttaccaagactcagacagcatagaatctactcagcatctccttcgccacagcctcccttccccaacatcacattagccttgagttgtgatcgactggcaggagccctagcaggcctgagaatagcatctgtattatggtagaaagcccagaaatgaaccctggggagaggctctggagttggcctggagaaggagagagcattactatgttgataagagggaaacatggaagaccaaacaggagacacag

SEQ ID NO: 3076 - DNA, 248 bp, Homo sapiens
gactgagatgtgtttttacaaggcaaacagttccataaggccttggaaagcatactgtcaccccaggagaacctaacagggggagaagagcacccccagtgtggctacatcgaaagcatccagcatattctgacagaagtcagtggtgtgcaagctctggagagtgccgtccagcatgaggccttgaagtatgtagggctgctggactgtgtggctgtgtaccggggcaagctgcgtgagattgattg

SEQ ID NO: 3077 - DNA, 341 bp, Homo sapiens
  misc_feature (1)...(341): n = A,T,C or G
acggcaggaaatggagccattgctttctctgcaaaaagngtgtgaagccttcctggatccattgtaacacctgcaatcgctgtgcactcccagaccattcctgtttggggcctaaagatggctgctttatttgtggtgcgctggatcacaaacgcagcaattgtcccaacatcggcacctcttggagagctaacaagntagttgaattctttggctttctggaaaaaagattgctcatgtcaagcttcctaggagcaatctacagaagtacaaagctttcagaggactcagaatttttcagagtgctaaatcgttcctctcaccattacgtgagatgccag

SEQ ID NO: 3078 - DNA, 352 bp, Homo sapiens
  misc_feature (1)...(352): n = A,T,C or G
ggcagggaactgtgagaaanttgctcctgacagcgcacctgcntccttcatgaantgaatntgaatnttgatctacacanatncccggttcttcttgactgtggtgacttgcancatcctagcagccntatcangaggaaaatgagcanggctccngccnctatgcctgnnactggtnctgncaccatgccaangctctgnacatntgnttcctcngaagcnnaaacngaagnnccgtnaaacataagctcggagatgcgtgcacacccaggacagaagcctggacaggatggcttccaaaccacacttaacaaccctcgcatgccgngagatgccaggacttggaaggtgg

SEQ ID NO: 3079 - DNA, 243 bp, Homo sapiens
  misc_feature (1)...(243): n = A,T,C or G
gaactgagagaatgtcactaacagcacggtcgggggcagcgcanagccggaacccgaggagttgagcctggtgaatggctggctcagctgtaaggcccaggatgagattctgaatttggccttcaccgtgggctccttcctgctcagtgccatcaccctgcctctgggcatcatcatggacaagtatggtccaaggaagctcaggctgctgggcagggcttgntttgatgcctcctgcttgct

SEQ ID NO: 3080 - DNA, 232 bp, Homo sapiens
  misc_feature (1)...(232): n = A,T,C or G
gtggaatcttactactcgctgnaaggaatgngactacacaagcacngngcgacgctnngactcaananaagctnaagctgtcactgnntcnctatatgaactacacgtgantaactccttttttctnatgtctgactnntgtgncnctatctctnttttttggagtctgtctaatttcatctgtttggattgcttttacacattaaaaaccaattttttaaatgaaaaaaaa

SEQ ID NO: 3081 - DNA, 317 bp, Homo sapiens
ctgagggagaagtttgcgaggggcagcccaggtttctggagatgatgcgtaggcagcaacatgtctgggatccgaaggcaaaggagccggttcgcctgttggggacaacactttcttctctatgaccatttcgtgattgccatcaaagacagcggcccacgggggtgctgcggattgatcatcccgaccaatgaggaactgtccgttggtctctccgattttcttttgtattatgtctgttacactttccagtttcacgggtgaatcgatgcctgtagtaattataagaagaaactttatggaaaaaaatcaaacgg

SEQ ID NO: 3082 - DNA, 374 bp, Homo sapiens
  misc_feature (1)...(374): n = A,T,C or G
ggcctcgcgagaagagagcgcgcgcgggcgtggccggggacgcgcagtcgattggccgctcctcgccgctcgcagctccggctcggaccaaccgcggagctgtgcctggactcctcccgtcaccaggagtggtctcgagagcccgtgctcgctgcctttattcagagtgcgcctgcgcagtagcaaagcttgcctttgctccaggacccgccccttgtcagtcatattgctagccaatcgcggcgtcagccagtcataaagggcttgttttgtgcaaccccaattctgccagncatttattttaaccttncgcaggcattcactgccaggggtggacctagagccatatatataggggcttagccagcaccctg

SEQ ID NO: 3083 - DNA, 178 bp, Homo sapiens
  misc_feature (1)...(178): n = A,T,C or G
gactgaggtaccaaccactgtgtgtgacctactaaagaaactacatggaaaatacaangcgtgtctgtcttactgagtgagagaaagtgaatcaagcataaacattcagaggcctgacccagtatacagcaggtatcnnacacaaacctctggctggagctgcatagaaaaagaaaaa

SEQ ID NO: 3084 - DNA, 272 bp, Homo sapiens
  misc_feature (1)...(272): n = A,T,C or G
ttactgaggtgcccaggcccgtggttctcgtccagctggaagggagggctgagctgctcgttgttctcagctgaacacagcacaggctccagggatagcatgcagagacgaagaggaagaacagagagggccaggaagagacggcggcgaagctctggttcaagagcagngaatgagagctacagatcagaatttatagagctaanaaaatggctgaaagaaaggaagtttgaagacacagacttagtacccgccagctttccaggtgagag

SEQ ID NO: 3085 - DNA, 310 bp, Homo sapiens
actgaggcaaggcaagacagtcatgcagttccaaatcgtcactggctgcacagcgtcgaaggccatcgtggggttcctgaaactgtctcccagaaaatcaaattctccggccagaaagagttccgttgggaaagtagctgcctgacataccgtgtgccctggaccccatcctctgagggcggagacttacaggctcgtgctaccaacactcctggttttatatggtgcagaggattgtcccaaattcaaggtcagcttggactacagaatatgacgatgtcaaacgaacaagcaaacaaaccaaaaaaaa

SEQ ID NO: 3086 - DNA, 115 bp, Homo sapiens
gagaaatctttctttgactcagaagaagaggcacttggcgaggtcctccaacaagtttggtgatcttaagtatgtccgagttgtcttgcatccagacacagagcattctaaaggt

SEQ ID NO: 3087 - DNA, 377 bp, Homo sapiens
  misc_feature (1)...(377): n = A,T,C or G
ctgcttcttctttgggaagnaatgngcgcactgcgaggtatcccaaatncncangnaccccgangangggcagtnngcggagccantctgaaactgancacnncncanatgtnanancncaccggtctnntgganggaacgcagggcctgtctancttaccttggtgcctnncccgtgcatntcncaacctatctcctcaccggtaaaccatatacacagcagacccaacccagccaggactatcgaattttatctgtagcctaactccattcgtgaaactgaaattcttggaaacaaatactattttaaatatcctatctcattagatctgctaaatatatttgtccttgnacttacttttatatggaaatataaa

SEQ ID NO: 3088 - DNA, 237 bp, Homo sapiens
  misc_feature (1)...(237): n = A,T,C or G
ggaatggccagtgaggacttggaacctagtgaagaactagaccagccctgttttgaggagtcattagaagacgccctgagngacnancncanttgaggtnttggatgtgatatccantgaggagctggaccttattgaagatnattcaangtgaaggctgtacgtggngccagggctacacttctcantgaggacctgggacctggtcttccacgaggaaggaagcccagtctctgg

SEQ ID NO: 3089 - DNA, 249 bp, Homo sapiens
  misc_feature (1)...(249): n = A,T,C or G
actggtaatatgcagactgncggcccggcctccctggtgtgaagcttgcggtagttctgaaacagctccctggccagcagtgcaccactggagaatgtcttagaaatccaaactctctgatccccgcagaatcaggaaatccagaggtggagtacagcagcatgggctttacaaaccctcagggaagatgatgtgtgtagaacctggtgggccaccgttgtgcaaattaaaagaattcacacaacctgc

SEQ ID NO: 3090 - DNA, 299 bp, Homo sapiens
  misc_feature (1)...(299): n = A,T,C or G
tgcctctggacaatggatacaaggaagccaaactccctgcccaaggaaacaagggtggcctctactccagntcccaaaagagtactcctttccatcagaaacctcatctgcatggccttcagacgacacactcccagcagccttctgggtctctgagcccccacccacactgcctgcgatcttacagtagcctgcggctccaaactcttcctttccctcctaaccagccccaaaagctctgccacgcgttcacgggcagtgaaataaagtacattttactttngaaagaaaaaacataa

SEQ ID NO: 3091 - DNA, 211 bp, Homo sapiens
  misc_feature (1)...(211): n = A,T,C or G
actgagagtcttctgccccactcccaccatagaggtcagctccagggaagactttggtcctagaggtcaccaggccagcccaggccattgcagaggaaatcacatcctgggctatttgagttctgctggcgntgattctgatggggaagacacttctgcatctgcaatgacaagtcaataagataaagctgtgtttttaataaaataaaaa

SEQ ID NO: 3092 - DNA, 148 bp, Homo sapiens
agactgggttcagttcttgagactgttcctctctgctgcctcagagcacgattacactctggagtacctctttctttgatcgacccatgtgactcagaacacccacatatgagtttgaaacaaacgatcaaataaataaacgaatgaa

SEQ ID NO: 3093 - DNA, 233 bp, Homo sapiens
  misc_feature (1)...(233): n = A,T,C or G
gagtatggacacactggaatggattcttcttcangtctcaccattaaggtcaatgagagggcaagcagacagtgcaagttaccanaaagactgcaaagtccaactaaagggcgaanggagacaccaaccatancatcagaagtcacggctggccggggccaggctacaccccgtatactaagggagaagtggctttactaataaatccatgtttgaacctggaaaaaaaaaaa

SEQ ID NO: 3094 - DNA, 102 bp, Homo sapiens
ggtcttagaaaaataccctatgtggcaagaaaggccgatttcttacctattggagaacatttgtctctaaataaaatctcaatcgttccagagaaaaaaaaa

SEQ ID NO: 3095 - DNA, 267 bp, Homo sapiens
  misc_feature (1)...(267): n = A,T,C or G
gaaattctacccccctgttcagcttcaaancaaacacaaaacnactgaagaaaanaataggangagggagagaanggggaanaagagaaggacagtaatgaagataggatgaacaacagctctttgtcaccttttggactccaatgcatgctcagtgaattggaataatgttgatctttggaaatatttagaangaccctatgaaaatgggatgatgaacngntctttgtcnccttttggactccaatgcatgctcagtgaattggg

SEQ ID NO: 3096 - DNA, 270 bp, Homo sapiens
  misc_feature (1)...(270): n = A,T,C or G
gttaagattgctgaggagnctctccaaattagancttgcctggaagngggtacaaactcattgaggtgcccagaagaaacgactanagattagtttgaagcctcgcccaagaaanacattatttccccaaatcttgtccaagcctgggccccccaaggcttattgccaatggaagcctcaagcctttttggtggagttnggntaattcttattatntngggggagtgggacggtttcaagatttcaaggttaccctttgggaaggtaaaa

SEQ ID NO: 3097 - DNA, 259 bp, Homo sapiens
  misc_feature (1)...(259): n = A,T,C or G
agactgggatacaaattggaagacctgaatagngaggaacactctcagcgctctanaagatatggaagacataagatctgtcactctgaatacaagccttgtgaacttaagggatatggaaagaagcaatgtacctttgcagataaaaggtttcttcaaatatatggaanaatccatactgaagggaaaccctatgaatgtaagcaatgcagtcaaatcttcacaaatttctgtcatcttcgaaaacatgaaaaaaaac

SEQ ID NO: 3098 - DNA, 131 bp, Homo sapiens
  misc_feature (1)...(131): n = A,T,C or G
ccctaaggggggggtangatgtatgaanggggggantgggaanatngntnttatganngcggggggaaaagaaagtacctncacagtccttagagaacggganagctnaagancgctttaaaaaaacaaaa

SEQ ID NO: 3099 - DNA, 226 bp, Homo sapiens
  misc_feature (1)...(226): n = A,T,C or G
aagagcgatcttgcagaggacctgaatttaattccaaggacctgntttttattcccagcattnataccaaataactgcaccangtccctgtgatgnnccananntacatatgganggcntgnntgnccatttcnatcaccgttccttctaaataccngagttcntgtccaaggacctgagtttaattcccagcattcntaccaaataaatcaccaagtacctgtaa

SEQ ID NO: 3100 - DNA, 110 bp, Homo sapiens
  misc_feature (1)...(110): n = A,T,C or G
gccagcctggcctacattganaaacctcattttgggaaagtgaaatactttgtcaattaanatgcacttggttcaatanagacttttggaaagngtccaaaaataaaaaa

SEQ ID NO: 3101 - DNA, 196 bp, Homo sapiens
  misc_feature (1)...(196): n = A,T,C or G
tttgcccccatgcatcaccctcacanngngacccactttgggnngggcaaggnttccttgttntgcccaaggaaagcggcgctacnatcgcaagcanagntggttacgggggggnaaacaaagccanttttttntaaaganggccaaacccacaaaaaaaattgtcctcaggnttgggngtgttgaccccactgca

SEQ ID NO: 3102 - DNA, 320 bp, Homo sapiens
  misc_feature (1)...(320): n = A,T,C or G
gactacaaaacatganngtcaatccagcttcctgtngcctaagagangaggagtcaattattngtngcctggncataaactactaattcagacnncacaaaanttattncagaaagaagaaacaatgtaactcanncactgggaggaccgaggtcnnggngaagagggaggtgggaagagcatggcctggccacgatttttgcagagaggagctctccncaccagcttcagccatcaccaccttgctgtgtncctgctcacgttcttcaggtantggctggctgacactcttgtcttctgcctgtggggacgatacttac

SEQ ID NO: 3103 - DNA, 127 bp, Homo sapiens
  misc_feature (1)...(127): n = A,T,C or G
tgaataaggccagagctggcctacattganaancctcattttgggaaantgnaatactttgannaatgaaccccgccccccggttctttaaanacttttggaaagngtcaaattaaaaccttgatca

SEQ ID NO: 3104 - DNA, 188 bp, Homo sapiens
ggtccacgtttggacgccagactgttggaagctgacctccggctcacaagaaacggggtacacctgggaggcaaaactggactgaaaagagaggggaactaggcagtcgggagaaaaatggagctaagtcaagattcatgatcaaagctcaaatgtttaataaaagtctgccatgccaaaaaaaaaaa

SEQ ID NO: 3105 - DNA, 103 bp, Homo sapiens
  misc_feature (1)...(103): n = A,T,C or G
ctgaggaaacctttactgangtnccattgggctgagntcgannctgggcactagggcataattacttcttggggaactctcaaaggtcggacaggaccaacaa

SEQ ID NO: 3106 - DNA, 183 bp, Homo sapiens
  misc_feature (1)...(183): n = A,T,C or G
ttggaaagcaagcaactgcttgcttgaacggaggcctacataaaccccagggacctagccttctccccggggttagccatttcccaagatgtngtaaggaggtcacatgtatagagtctggcagctttgcaggaagctaatatccaaatgaaactcagcagcccctcctttcccagcttcacc

SEQ ID NO: 3107 - DNA, 450 bp, Homo sapiens
  misc_feature (1)...(450): n = A,T,C or G
gactgagtggactatgccgattattaccagggcctatgggattgccatggtgaccagccggatgaactgtccttncaacggggtgacctcatccgcattctgagcaaggantacaacatgtacngctggtgggtagganagctgaacagctgtnattggaattcgttccanaggantatttnaccaccgactttgaaatggaaggaatattgaagcccanngaacatattctcagaccataagaaactnccgtcccctactntggccatggatccttctcttccctgaatggagccaagactntnctgtttcctgngactttaanccactgttaagatgagtaggaagaanacagnncatcaatacctgtttctnaagcaancagcttctaacttcctgccctctctgtgnccccacatncataagcctttcctacaagcctgctacaaa

SEQ ID NO: 3108 - DNA, 150 bp, Homo sapiens
gccagcccatctctgggtagccccctggaggggttgctgagaaaggtgctggccccttgatcccctcccttgctttctgtcatcctttcttctcatgtccacactgctcttcaaataaaaacatttctcctgctcccttaaaaaaaaaaa

SEQ ID NO: 3109 - DNA, 479 bp, Homo sapiens
  misc_feature (1)...(479): n = A,T,C or G
gagcgtggattcttctnacacccatgtcccgccgcgangtggaggacccacaaggtttctaatgaagagactgtgtgtgtcaccgctcataagagagaaaaagagggagggaaggagagagctctttaaacaaaagacaaggaggcccaagtaggggcctggagccgtccccggagcctgctcagcctgaagaccctccagttccccggctgggcaggcatttcggagagggtctgccaccgaggcggaacgggccggcgctcgcgcttcccgcggctggagaagaactagagacaaagccgggatccaaggccttccagcgaggctccaatcagcgcccgcccggagctcgctcgccgccgggcgaggcgcgaccccctgcgggctgtgactagggaggggagcccaggcccggactcggccttccagccgccctggctagccctggctagccacgttcccccggtcgcactcagcct

SEQ ID NO: 3110 - DNA, 177 bp, Homo sapiens
  misc_feature (1)...(177): n = A,T,C or G
tggggggaccgtggcttcntctacacaccctgtccccgccgcgaatggaggacccacaagancatnaggcnnatgggttttccatcntccnaaagaccacncgtncaagtaagtcaccagtgantnngagttccaagnaggctnttttggctngtaaaaccccaaagaagactacct

SEQ ID NO: 3111 - DNA, 285 bp, Homo sapiens
  misc_feature (1)...(285): n = A,T,C or G
gtggggagcgtggattcttctacacacccatgtcccgccgcgaagtggaggacccacaagattttctaccttgcctcactcctctacaccgtcagctacatctggtgtctgtactcggagctgaggaggaagagcggccagagtgagaggagcacggttgcccaggtgacagattatgtttgccaaggtggtcacatattgttccttttgccaagtgagacccccaaaggggtgatgacgcctgtgntccttttgggcaatgncaatgaatgtttccacaacttc

SEQ ID NO: 3112 - DNA, 350 bp, Homo sapiens
  misc_feature (1)...(350): n = A,T,C or G
agcgtggattcttctcacacccatgtcccgccgcgagtggaggacccacaagatttatcaagaaaaaagaacggagatatccctgtcagtgtcaatgaagatcctccaaaagattgattggagagtcaatgatccaagaagacttagaggaggagtttcaagacaacccactgtggactggcctccntggctttctgccttacctacttcccctccttgatcccttcctctttctcctccctctcatggtgggcaagatcacacaatccttccaacagcgtctagaggaccagctctcagagtagcagaagatattatgcaagctgccaagtgagaaccacaaaggagac

SEQ ID NO: 3113 - DNA, 156 bp, Homo sapiens
  misc_feature (1)...(156): n = A,T,C or G
ggggagccgtggattcttctacacacccatgtcccgccgcgaagtggaggacccacaagccgncntcatntccaccgatgngtttanctactctgnanaccttcttgcaacaggagacatanggtggcggagntgttattttccagcgggaacaca

SEQ ID NO: 3114 - DNA, 266 bp, Homo sapiens
  misc_feature (1)...(266): n = A,T,C or G
tgtcccgccgcgaagtggaggacccacaaggtaagcctctgctcctganttanttctatcccaagtgagaaccacaaaggctcgagaccatnagcggcctcttgcatatactttccagtgnntttgtcagagagatccgacagagccctagctcctncagaggtggnccanaaagcgagtgacgagagcccancagacatggtaaaaatgaccangtccaaaactttccaagcttatctnngcncactgtcacccgaacttacagc

SEQ ID NO: 3115 - DNA, 184 bp, Homo sapiens
  misc_feature (1)...(184): n = A,T,C or G
ggggagcgtggattctttctacacacccatgtcccgccgcgaagtggaggacccacaagttccaaagaggtgcttgagctcgagtcctcaaannnnggnnnnnctggcagcntttgcggtatatttgnaaacananaccctggtnaccctagaggctnttacagagattcttggcattgaacca

SEQ ID NO: 3116 - DNA, 121 bp, Homo sapiens
  misc_feature (1)...(121): n = A,T,C or G
gtggattcttctcacacccatgtcccgccgcgaagtggaggacccacaagcgattgagaagattgtctaccaaatntagaacagactagatttatcccacagccactggagaaaaaaaaaa

SEQ ID NO: 3117 - DNA, 102 bp, Homo sapiens
  misc_feature (1)...(102): n = A,T,C or G
ggggagcgtggattcttctacacacccatgtcccgccgcgaagtggaggacccacaagtggcttgagctcgagtcctnacaccggagccaaaaagaagaaaa

SEQ ID NO: 3118 - DNA, 228 bp, Homo sapiens
  misc_feature (1)...(228): n = A,T,C or G
gtggggagcgtggattcttctacacacccatgtcccgccgcgagtggaggacccacaagaatcattaaggaaatagaatctgccaaaatcaaatatatgttctatttnctactaacaggaggcccnaccnngaggagggagacngncagaggattattctgatccagaatcgagacagtaatccagaggcccaacctccccaagtgagaaccacaaagggagtaccac

SEQ ID NO: 3119 - DNA, 214 bp, Homo sapiens
gagcgtggattcttctcacacccatgtcccgccgcgagtggaggacccacaaggtggggtctttcagcaggcgcctcggaaatttcatctgatagtcggacatgatggctacgccttcaaccccagcctagcccggtgtacagcgcaagttccaggatggcagagggctaggcagagaagccctgtttggaaaaaccaaagaagaaaaggaaaa

SEQ ID NO: 3120 - DNA, 281 bp, Homo sapiens
  misc_feature (1)...(281): n = A,T,C or G
agcgtggattcttctcacacccatgtcccgccgcgaagtggaggacccacaagctatatagatttccattgcgaagcttgagctcgagtcctcaaacctgcgcctccgattgacgaaatgcttcctcaccaccgtcatcatcggcgaagttaagggtgaagactcatctttagtaataaggcatgactgtaattccngcaccctctggccattattaattatgattcattgcatgaaagagaaaataaagatctacatacgctcaaagcacaaaaaaaaaa

SEQ ID NO: 3121 - DNA, 336 bp, Homo sapiens
  misc_feature (1)...(336): n = A,T,C or G
gagcgtggattcttctcacacccatgtcccgccgcgaagtggaggacccactagaggcaaggacntgaagnggnggcctcttcnntntagtncattctgaanaagaagctgnccttcctttcaggangaaaggacagacgcnngtggnctcatnttgacaattgncaggtgtgccttgagcatgacacantatggatgagctgagngncnctttngattatntactnnncattccnagtgagacccaccntaggaattccgctgtgccttgagcagacaagtatggatgagctgagtgtcactttggattatctactcagcattccaagtgagacc

SEQ ID NO: 3122 - DNA, 310 bp, Homo sapiens
  misc_feature (1)...(310): n = A,T,C or G
ttgtggggagcgtggattcttctacacacccatgtcccgccgcgaagtggaggacncacaaggnnngctnngctcanntgtnanccntatcctgnggcatgnncaacacagagtttctaacctggatcatgatatggagatcattttaaggttcctttacttcttttgtgtgaatcggtgtcctacggaagatcagccattgctccagccccactgccttctttcttaaagacactgagcggatccacctgtcctggatgtctagttctgtgagaataaaattgttcccattcaaacccaaaaaaaaaaa

SEQ ID NO: 3123 - DNA, 394 bp, Homo sapiens
  misc_feature (1)...(394): n = A,T,C or G
ttgtggggagcgtggattcttctacacacccatgtcccgccgcgaagtggaggacccacaaggnatgtggatgctgtgagctcgagacctcatttgggagtatttgtgtccttcaaaccagaagntctcctctttgtctggctatcggaaacactgggtatgtggatgcttgagctcgagncctcanagaataacatgctggagttggttctctccacatgggtcccaggattggctatcagcctttgtggcaggtgtttttatccacgaagccaactttcccccatttttcttaatgtggatgtttaaagctatgtatttccacttactttggctatgnngnattnccattctttnttttcttnctttctttcttccttcctttagtttcttt

SEQ ID NO: 3124 - DNA, 112 bp, Homo sapiens
ggacggacccacaaggtataaggcagtatggcttatcttctttgtgctgggcctggggacactgctcccctggaatttttttatgaccgcaaccaagtgagaaccacaaagg

SEQ ID NO: 3125 - DNA, 191 bp, Homo sapiens
  misc_feature (1)...(191): n = A,T,C or G
tacacaccctgtcccgccgcgangtggaggacccacaagggacttntngaaccatgccnaagccncncagtgaagcagggactgccttcattcancanccanctagcctccatgcagccatggatgacacnttnatgngaacacatgtngnctgcctaggccatctnactctgnccccatcatgggccgaa

SEQ ID NO: 3126 - DNA, 377 bp, Homo sapiens
  misc_feature (1)...(377): n = A,T,C or G
gagcgtggattcttctncacacccatgtcccgccgcgangtggaggacccacaaggccccagatccaactacaagcaaggacatccacttcttctgaggttgtcttggttcctgggccttcttatagcctgcagaaggaccctcccagtctcctgggcagccaagtaaacagaagtgggaccgcttctgacatggcttccccgtgttctggggacctcagccccactggtctggccccgccccctgtcaccactccaggaccggctgcgcccaccgcaccgcgcttccccgacatctacggcggcgacgcgcagctttgggaggcgcatttccgcggcatcgggcgcgcctaccgcgcttgagctcgaggtccttaa

SEQ ID NO: 3127 - DNA, 361 bp, Homo sapiens
  misc_feature (1)...(361): n = A,T,C or G
cgtggattcttctcacaccccatgtcccgccgcgaagtggaggacccacaaggattccaggatgccttcccagaacagaacccagacatgtgagccgctggccggacacaacagaactggngantgtatatactttgaggcatanngnanntactactctgcngtgnagganacaactcnngctnngntngcaggntgcaccaacgttggctcntgggntntcanntnttgnaggcntttcnttangnacatggttgttgnctccttggntaganatgggatagcctctatntcntcgactagtnttccaatacaatgctttcttctactccaccaaataaattccatttttgccagaaaa

SEQ ID NO: 3128 - DNA, 223 bp, Homo sapiens
gtctgggtgaggattttttaccccttacccatccccttctacttttaactctttgagaaacgttggcagtgactgcatatggttgtacttctatcaagaagcctggagaagctggtcaatagaagagtatgggagccataccatcggggctgttgctgacagtggaaactgaaagaaaatgtctattgattaaaatgacaccatttcttctaaaaaaagaaaa

SEQ ID NO: 3129 - DNA, 452 bp, Homo sapiens
  misc_feature (1)...(452): n = A,T,C or G
actgagggaggggagcatgtgtgtgccatggcacaaaagcagaggccatcttgcaggagtcaggtctctctttccatcaggngggacccaaggagtcatgacatcagccttggagagtgctgcccgtgggnnantgtnagtnnncctngnngctttgagcctttgncttcccacctgtggcatgggaacaacaacatgagtacagacacagntnaggagagaganagagagagccagtatcancttctggtttggaancctgagancctctttctgagtcactttgtttctgcccccaacctttgctttgntatgggtcctgccttctccaccagaggcaggaagagctggcatggagctgctgggcaacacgggccctgnttccccacgtttagtgngcggacagaactatgttncancctgggctggtgagtaaagctctggtctgcaga

SEQ ID NO: 3130 - DNA, 382 bp, Homo sapiens
  misc_feature (1)...(382): n = A,T,C or G
tgagactcaggctggtgctatgaggatcaaaccaagggtcctagaagcagttgcttggggcctgagaagtggnctggagcctgtaaggagaatcagcagtcccccatcaacattgtcactgctaggacaaaggtgaaccccagactgacacccttcatcctcgtcggctatgaccaaaagcaacagtggccaattaagaacaatcaacacacagtggagatgacgctggggggaggtgtgtgcattatcggaggagacctgcccgcccggtacgaggctgtacagttgcacctgcactggncaaatgggaatgacaacggttcanagcncagtattgatgggagacactttgccatggagatgcncatcgtgcacaagaagt

SEQ ID NO: 3131 - DNA, 375 bp, Homo sapiens
  misc_feature (1)...(375): n = A,T,C or G
agtttgaaggaactgagtgcagcggaacacacctgtaatacttcaggaaactgaaacaggaggattgctatgaattccagagtgggaattaccatatggcaagtagtaagccagccagagtcatagagggaagccctgatttaaccatgttaaggataacaaaatctggcctgttggtgtgctaggatcctaggccagggaggtgtaaaggccctgattgctctggaggaagctggctgcgtgctgggagggaaaggtcatggttcatggactcatgctggcaaagtgagaggtcaaacttccaaagtagccaaaaaaggaggaggaagangaggaggaatagaagaacgaggangcggaagaagaggaggaata

SEQ ID NO: 3132 - DNA, 125 bp, Homo sapiens
cgctcactgggggcccatcctgctgttcttttgacaatctcctggaagtgggtcccatctgtaagtatctaattcactcttctttttgaaaagtattcttgacatggagtggaaaacaaaacaaa

SEQ ID NO: 3133 - DNA, 315 bp, Homo sapiens
  misc_feature (1)...(315): n = A,T,C or G
actgaggctttctatcacaggntgancttcatttttttccttttcctttttgtgattgagctagcccaggatgtgattgagctagccctggatgtgattgagctagcccaggatgagcttcccacantacacagagtantggtggctcagtggaggacttcttgcttttccagtgtggntggagaaatgcncatttgaactggatgttgcctccgtccttggtttaggcattactccttcatggagtccctgtctcaatctgtaccagtgaacaaatgtaaaccatgaatttgtctttctttaaaaaataaaata

SEQ ID NO: 3134 - DNA, 241 bp, Homo sapiens
  misc_feature (1)...(241): n = A,T,C or G
actgagagtttggattcgagtggtttttctgacatacctgaacacttggagaggaacctggtacagaggaactctactataaggatgagccccacagatccactgtaagcctgacatattaattgtgatgaccttacnagaaaagtgatattttaatataaacagcaacagaatttaataatggatagagtatcccccaaaacgtctgtcatgcataattaaaagcacatacttatgctta

SEQ ID NO: 3135 - DNA, 448 bp, Homo sapiens
  misc_feature (1)...(448): n = A,T,C or G
ggctagtgctgcctttcggattcatctgagaaaaggcctgttgctgagggtgacatgnggtgactatacnagactcaatgncggtgtactgagagcaagtgantgtgggtgctcaggcctgagtgggacatccacatcaacacctgccaaggcccagggagcttcacggaagaggactcggagagaagatgagaacaaggcgatgaggggaagtgctgcggaacaccgtttcccaggcagaacatggccactgcactcctaatcgctcagcaactgagatgacttgagtgagacctgcagaagactgggcccgtcagcatcccatcatggatgggtaagggatcataaggacccgcttccctgaagcttacagttggtacttgctgggattggggtgggcttttanggnttttaaaaggcnacaccatttcccagtgtgcatgtgttc

SEQ ID NO: 3136 - DNA, 280 bp, Homo sapiens
  misc_feature (1)...(280): n = A,T,C or G
atcccacgaatggtanactcctgcaagccagtggctcaaactgaccttgaactgcgagctgacagtngggcccgccggtgtttgcttccgcatttcaaggtgncctggntgttgcggctggagacgtgttcaaagaggtcatagatgaanncgaacctgtgtgaagggagcacagactgtgaggtgtgtacacngtgaccgtcaggtacctgctactgtaattacagtgtagttctacaatgataattaaaataatacacggggccctgaaaaaaaaaaa

SEQ ID NO: 3137 - DNA, 116 bp, Homo sapiens
  misc_feature (1)...(116): n = A,T,C or G
gactgagaaacacctgttttgngctgagttattttgnggaaaattatagtttttgcttttgtgaagttggcattttcacctttgccctaataaaattgngtgtagaaataaaaaaa

SEQ ID NO: 3138 - DNA, 155 bp, Homo sapiens
accaggaagagaatctactgaaactacagcttgctaagttgtcttaacaaaagatagaagctcaacttgacaagattcgtctggatcccaggaaaaacatggatccatgacttcttcaaatacagattcctggttttctctgtcggaaaaaaaaa

SEQ ID NO: 3139 - DNA, 158 bp, Homo sapiens
  misc_feature (1)...(158): n = A,T,C or G
ctagggggcaagaaatacgaaagggcggctgtggacatgttcacnaaatagggtctttntatcgantccantcttcnctgncagcagtctagtccacttggcaaaacaccaaatcaagtagcantngacttgatctanaanaaactgcaaggctcccg

SEQ ID NO: 3140 - DNA, 336 bp, Homo sapiens
  misc_feature (1)...(336): n = A,T,C or G
atcgcaggccctctgctgncatcttctcccagggagtaccagaaacatattaaaagaacacatgccaaacatcacactccagaagccgattgaaagttactaccagaggtacctgaatggccgtggggaaaaacggagcagcccccgtgctcttggagctggccaatgaggtggactatgcaccctcattaatggctcggattatcctggagagatttctacaggggcatgaacagactccaccctnactggctanttnctncnctcaggtncttantngttttctataacatgnatgnttgttaccttgnnccagaataagaatagattagagca

SEQ ID NO: 3141 - DNA, 240 bp, Homo sapiens
  misc_feature (1)...(240): n = A,T,C or G
gactgagataaggaggtcggccagttcctcctgccttcgggaagatgtaggcattgcattgggaagcattgtttgagagatgtgctagtgaaccagagagtttggatgtcaagctgtataatgtttcttcaaaaaaagttctaacaaagggatctttaactttttttttctccttctacttttccttgtaggctatcagcctttgtataatgaaatgngagctttgcttaaaaaaaaaaa

SEQ ID NO: 3142 - DNA, 298 bp, Homo sapiens
  misc_feature (1)...(298): n = A,T,C or G
gacactcaaggcaccagctctcctcaaatatatagaagaataaaagncaaggaacaaggcacagcattgcattccagagtagaaccccagtgngcaaccattgacaccaacacactgggctgggacactggcttntgtgatcttgacagcgggagttgnctttgcatgtgaatgagctggccaccattgnngtaacgatgtgaaacagacgtgaaacnggggaattctngaaccnnttantgtcttctngcaacanaaaattctggttgagncacgttgaccattttaaaaataataa

SEQ ID NO: 3143 - DNA, 119 bp, Homo sapiens
  misc_feature (1)...(119): n = A,T,C or G
cgggccgagcctgacgtntgtcntcttcangtnggcaccggcctcccgagggagcggggcgggcagaggctgncccatggaaccgtctgnaaaancaaccctnttaccttcccggggag

SEQ ID NO: 3144 - DNA, 182 bp, Homo sapiens
tgagagatactagatggcaacttggggaagtattgcttgcttagcaagagcttagggataattcctgttaacagtaaaactcatggcccaccagctacaaagtgtctttgccatgaaacagaggacatgataaactgtttaccttaatgaaattcaagttgcattgtgaattctgccagata

SEQ ID NO: 3145 - DNA, 287 bp, Homo sapiens
  misc_feature (1)...(287): n = A,T,C or G
aatgttctcccatcggaatacctgaagcagaagaactntnccattttccttgggtntggactaacagaaaatnaaaatgtcnctaggtgngnaaggatggctcagaagcaaaggacatttgttgctcctccagaagactggagtatgcctnctntcacacacatttgggcagcccatgatgcctctaagtccagctncaggagatctgatgctctcttagccttcttgggcacccatgtgcacgtggcatgtgcacacacaaggaaataaataaataggataaataa

SEQ ID NO: 3146 - DNA, 101 bp, Homo sapiens
  misc_feature (1)...(101): n = A,T,C or G
ggggatccaacgccctattttggctngctctgngcactgnanntagagnacagaatacatgcatgcaaaacacccatacacaaaatataaataaaataaaa

SEQ ID NO: 3147 - DNA, 214 bp, Homo sapiens
  misc_feature (1)...(214): n = A,T,C or G
acactgaggtctgctgaatgctgtggactcggatgctgtatcaggcctgggtgttattggccatatcattgaaaaagacaagatcactaccaggacgctgaaggcccagatggactaacctatgctctggatggactaacctgtgctctggtcccgtctccctttttgntgnttttctttttaataaaatcacctttctttcaaaaaagaaaaa

SEQ ID NO: 3148 - DNA, 328 bp, Homo sapiens
  misc_feature (1)...(328): n = A,T,C or G
agcctgagccagatacctgatgaatactnnaggtagaagcatttctacactgactcaactcagctataaacctctgcaaggaaggaattctaacccatagatgctggtatcacctgcaccaaggcaaaggaagaaggatgcttcantctccagacagcctgatccaactccagatgtcangatagancaagtggctggggaccctggggtcacagtcttagggtatgatgcctgngcaanantcttgngttttgagatggagttagnccaaagggaagagcntaaannaactcagatccacactgatctgcctgacacaaccccgaaa

SEQ ID NO: 3149 - DNA, 325 bp, Homo sapiens
  misc_feature (1)...(325): n = A,T,C or G
agacctgggcagagccataattacttcttgtggaactctnnnaggnnggacaggaaaaagggtatngnncngtntngcaannacacacccggggactgggttccntnccatatccnnnccagnatagaattatcacaatacntngcatttttcnantggttggcttaggcccaataaaanaggganaagagatcntgcaaaacaaagaggatgaaagcaaggctgacaaactcagaagaacagcgttgacctgcgagggttgagtaagaaaagaattctctgctgcccaacactgtcacaggcaggacagaagtgaactgaggaa

SEQ ID NO: 3150 - DNA, 227 bp, Homo sapiens
  misc_feature (1)...(227): n = A,T,C or G
tgtctggtgcctgacctttataggaagagaagtcatttatattcaggagttctgcagagatacatgtcctccaaagcaccttctttgtcttgtcataataaggacagtgcatcccctcctgagcagctagaattggatgggtggaaagctacnatgaagtcgagcattcaagaagatggtgtttcagaggtctcagacaaagntgaagattcccttcgcctcggcca

SEQ ID NO: 3151 - DNA, 465 bp, Homo sapiens
  misc_feature (1)...(465): n = A,T,C or G
ggcatcctatcactttacagcntaagatgctccgagcncagcctgaaatcttggaatgacagccngtcanacctctgtagcancagaccaggaggaggaagaggagatggtcttcggtgaaaatgaggacggactggaagagatgatggacctaagngaccttgcccacctcactctttgcttgcagtngtccatgaagcagtgtttgaggtccaagagcaaaaggagaggtttgaggccctgttcaccctctacgatgaccaggtcanattccanttgntcaaganctttcgcanagtgaggatcaacttcagcaagcccgangccgcgncnagagccgcgnatagagctncatgagagtganttncacngccggaagctgaagctttacttcgcacaggtgcaggtgtccggggaggcccnggacaagtnctacttactgncaccacagcccaccaagcagtt

SEQ ID NO: 3152 - DNA, 489 bp, Homo sapiens
  misc_feature (1)...(489): n = A,T,C or G
gactgagatcgctttnacgagagaagactgatgaagaccccgaggtgcatcaacccgagacctggacagagggcctggccccaggtggacgcgaaggcggcttccgtctccctctgagtgcatctgtggacttggttgcaggctcacctttaagatatttgtgtgactcccaacttctcttccgtatcttagcagtttgaggttcacgaggcagcaaggatcagtaggaagcacaggtattaacaagttggccaaagttcacgtcccacctctgggatgtcgtttagtgcctggtgtcatggtcgcagttactctttcatgtataaagcagggatgctgtatctacctcacacggttactaaaagcaaacacggaatccaaagccctgggcacatgccgacatctgaaaagctggtgtttctcccacctccctccgagtgcatgctgtacgcagctcttgcttttatccctggggaaaggctgaggtca

SEQ ID NO: 3153 - DNA, 169 bp, Homo sapiens
  misc_feature (1)...(169): n = A,T,C or G
aaccagcaacctaccctgnctcttgggaccctagnatttatataccctntgnagantnnccagaattncagangtcncactatcncagaaactatactcagntggcaataanannatacccctgctagagcattgaggnaaatcatagtcagctgctgaggacagactg

SEQ ID NO: 3154 - DNA, 269 bp, Homo sapiens
  misc_feature (1)...(269): n = A,T,C or G
tgaggctcagattcccaaccaacaaggnctcaagggaggaccaccatgtgccgagccatctctcttaagcgcttgntgctgctgctgctgcanctgtcacaactcctagctgtcactcaagggaagacgctggtgctggggaaggaaggggaatcagcagaactgccctgcgagagttcccagaagaagatcacagtcttcacctggaagttctctgaccagnggaagattctggggcagcatggcaaaggtgtattaattagaggagg

SEQ ID NO: 3155 - DNA, 566 bp, Homo sapiens
  misc_feature (1)...(566): n = A,T,C or G
tccacgctgagcccatggtncacgntcagangaggtggagtatgcntaaggcctgcagatnnagggcncactactgcancttaagncnccatgcctgcaaagnaagctgtacccgttggagccatcannacctaatctgaagcgagggagttngacgttctcntaagcaagggctgnctccatggcctcctcanggtattctgtacccagtggnncagtgagctccatcacggtantgagatgcangatgcnnaaagagccttctctacctggcttatntccatttatcctgcacatgcccgagatgccaatcatacagcatgatacnaggtcagctgactgtggaagggaggagtcattcatgagccagganaacaaagtgcacttgaagctgngaactctacagagtcagtcagtnaacatcccatgcttggctcccacgctcccgnagactgctatgggtcaacggcctcangtgctcccaaaaacgggcaatccgatccaacgattgcttttactttgacagctggtgcctgtcagcttatttatacttcgagaatatactg

SEQ ID NO: 3156 - DNA, 193 bp, Homo sapiens
  misc_feature (1)...(193): n = A,T,C or G
gtggggagcgtggattcttctacacacccatgtcccgccgcgaagtggaggacacacaaggtngntacccaagttgtgctcactaccatgagnttcnattnngcccnnggagaaccngntnngatacacagttaaatacacagttgcaagcagaccaagagcatcaggatgcccaagtgagacccacaaaggg

SEQ ID NO: 3157 - DNA, 386 bp, Homo sapiens
  misc_feature (1)...(386): n = A,T,C or G
ggggagcgtggattcttctacacacccatgtcccgccgcgaagtggaggacccacaaggncacnatactnnctgcgngncgtctgaaaaacgagtggttggaaagccatccagaggcttccattagtgagatttttgagcagaaacaacaattggaagatatcgtctcccccatcctagcacnaaatgtctacaccacgncatttngntncctcataangagaccttncactnatnaacaggccaagngagaagcannnaggttttacagatgccacatggtgtagaaggctacattacatttcagtattaaatacgacaaacctgttcctcgttcctgccaagttcaagaaatagatncaggcttttgtcaaacagccgaaaaaa

SEQ ID NO: 3158 - DNA, 245 bp, Homo sapiens
  misc_feature (1)...(245): n = A,T,C or G
gagccgtggattcttctcacacccatgtcccgccgcgaagtggaggacccacaagnctgggaatgagatncagggncttatacntactagcacaaatgctgnactacggaaccacacttcnnaccctgttggttntggagaatntnctgaatntttttctganatntactgaaggtcaccagctttggagaatccnaggaatgttccccctnagaggaagaatgctgttggtcagtgaagaacga

SEQ ID NO: 3159 - DNA, 499 bp, Homo sapiens
  misc_feature (1)...(499): n = A,T,C or G
gtggggagcgtggattcttctacacacccatgtcccgccgcgangtggaggacccacaagaacccagcagtgatgtggaggtggagactcacgggagccccggacttcacctgagctacctcagtcgccaagngagaaccacaaaggaagaagaccctgacttgggggggaccaggatgcctgaccgggacagctatgccaacggcactggcagcagcggtggaggccctggaggtggtggcagtgaggaggccagtggggcagggacaggcagcgggggagccacctcagatgccatctgtagagacttcctgaggaacgtctgcaaacgaggcaagcgatgtcgataccgccacccagacatgagtgaggtatccaatttgggggtaagcaaaaatgaatttatcttctgccatgacttccaaaacaaggagtgtagccgccccaactgtcgtttcattccacggctccaaggaggatgaggatggctataagaatg

SEQ ID NO: 3160 - DNA, 140 bp, Homo sapiens
  misc_feature (1)...(140): n = A,T,C or G
ggggggagcgtggattcttctacacacccatgtcccgccgcgaggggaggacccacaaggactctcagngntcnnntctntnctcnttcaccangnagatgcnggacngattccactctcccaagtgagaaccacaaagg

SEQ ID NO: 3161 - DNA, 262 bp, Homo sapiens
  misc_feature (1)...(262): n = A,T,C or G
gtggggagcgtggattcttctacacacccatgtcccgccgcgaagtggaggacccacaagngctgctttatcacctcactgcttangctctgctctcaagcnaagccaagtgcaaactctccaagngagaaccacaaaggcggccttggncatnatagnntngacnagcntctgntccctctaccanntgaaaaantactgnctcttgacncaccactacccagcctacccctgctgcggnggagtctaaacctttaaatga

SEQ ID NO: 3162 - DNA, 341 bp, Homo sapiens
  misc_feature (1)...(341): n = A,T,C or G
agcgtggattcttctcacacccatgtcccgccgcgaagtggaggacccacaaggctnttnancnnanctntgaanaannttgntatgcttaaagaaatggacnnngatcttaactcagtagncattgctgtgaagctgcagggtatcaaaanggattcttcgctccgatgagnncatcctttnagncagnggnctggtggagacagagctccagttnactcttctccntccagnacccttatttccttatncganatgccancannactgcaaattatgtngcacaggaggaagcggtacaagaaccnnaactatcttgggctataaaaccttagctgagg

SEQ ID NO: 3163 - DNA, 179 bp, Homo sapiens
  misc_feature (1)...(179): n = A,T,C or G
gaggggagcgtggattcttctacacacccatgtcccgccgcgaggtggaggacncacaaggtagccnttgaaacattggcttgagctcgagtcctcanactactatgaggattaaattaaccaatatatgaaggtactttctacaataaaatgctcattacaaatgttaaaaaaaaaaa

SEQ ID NO: 3164 - DNA, 109 bp, Homo sapiens
  misc_feature (1)...(109): n = A,T,C or G
agcagcgtggctaagttntacacacccatgtncccgccgtgaagtggaggacccacaagtggttcaactggagctaaanccgaggcccggntagcaggtagacctttag

SEQ ID NO: 3165 - DNA, 236 bp, Homo sapiens
  misc_feature (1)...(236): n = A,T,C or G
ggggagcgtggattcttctacacacccatgtcccgccgcgaagtggaggacccacaaggattgaaaagacaaantcaganggattgaggttgctgaggagacnaatattnnagacctaggatcaatcaccaggaacagaagtggnnatacatgtncactcatacacancacatgcactataanataatgagttaactagacngcntcataaaaatcaattaaccaattctacctct

SEQ ID NO: 3166 - DNA, 246 bp, Homo sapiens
  misc_feature (1)...(246): n = A,T,C or G
ccatctagcacatgggggctcacanccatctgnaatgananctgacacactcttgtggngngnntgaanacagntacnctgnacttatttgnaatcataaataaatcctagngccggccggagctagnggagtgtaccagagcgagcaaaagtcctaaattcaattnccagcangctgatgaagcttcggnacagctacagtatgtactcatctacataaaataaatgattaaattcttaaaataa

SEQ ID NO: 3167 - DNA, 429 bp, Homo sapiens
tgaggttgaaaacctaaaacggatgacccaccaattggcctgggtccactgtgttgcggaagatggaggaggggagctgcagagattcggggtttatttgtataccctcatcctcctgcgataccaagccagccagaggtggcgtccctgactgctctgcggtcctgggcagggcaggaagctggcgcggccgccgactgggcaggcaccacttggcctagcccgctgttcgctggaactcgcgaagcaccatcactctgagttgagttcccgagactccggcctggtcaccctgagctgttttcctcccacatcgtcagttggcctctctcgcaagtctcctgatctcccgccatctgcttttcccttccttgaccgatctctggaacttcgaaatacattcaaccgccttttctgagaaaaaaaaaa

SEQ ID NO: 3168 - DNA, 142 bp, Homo sapiens
  misc_feature (1)...(142): n = A,T,C or G
actgaatggagtgtttgaattgcgctttgcgactctgaaggctgaaggnnncnggcnganacggnagncatngnntnccgtcatncctggacatgctttattattntcaaggccatggatttactactgaaactttttcttg

SEQ ID NO: 3169 - DNA, 416 bp, Homo sapiens
  misc_feature (1)...(416): n = A,T,C or G
tgaggtggggtctttcaattagcatctcctgcgcgcctcgctcgcgaccccggacccctgctccgcgccgggacccccggagcagcaccctanagccggaagacgaggacgatgaggaagatgaggacaccatgacgaggctgggtcccgatgacacgctgcagggccaggagctgtccacagagcccgacgggccccttagtgtcaatgtcttcacgtcagcagaggagctagagcgggcacagcggctggaggagcgtgaacgaatcctgcgggagatctggcgcactgggcagccagacctgctgggcagtggcacgctcgggcccggagccacggccacgctgggacgaatgcactattactgacacccggccccttagcgtggggccagagtactggatatgggactgcct

SEQ ID NO: 3170 - DNA, 245 bp, Homo sapiens
  misc_feature (1)...(245): n = A,T,C or G
agagaaacacctatgtgtctgttctcagcgaaacatccccccaagtgcctgcttcagcaaaacatcctctcctaagacagnttcctggaaaacatcacatgacacaaccgagtctccaaacgaacaaaagccagagatttccacttcagatatcctttgtatgaattttcttgatgacctttgtgggacttcttaacccaacaacctcctgataaagtttgtgcattctggctgaaaaaaaaaaa

SEQ ID NO: 3171 - DNA, 142 bp, Homo sapiens
  misc_feature (1)...(142): n = A,T,C or G
ctgccctatcctacgtcatcacctgcagctggntncaggntccaaggatgaatnggcgggaatggactttccccccttttttcccccctcttttntaaagcgngtctgccattaaaaatttgaaccttgagcaaaaaaaaaa

SEQ ID NO: 3172 - DNA, 221 bp, Homo sapiens
  misc_feature (1)...(221): n = A,T,C or G
atcccactgtgactcannaatacaccttttgtnctaagaggacgacgagcctgtgagaattccccatnttcccttccagaagtccaccctgtgnctgctgngaacttgagatgtatnattgnagcccctgttgtanatgaagccccattctcctctagccgaacatgttaaagcctncattctccatgaagactgtcattggaggtagaaggttttaagga

SEQ ID NO: 3173 - DNA, 321 bp, Homo sapiens
  misc_feature (1)...(321): n = A,T,C or G
actgaggtctcttctagccttntgcagnacgtgcctacccacacgcgctgaacctgnntnaccacaacctgagcccttggatgacaggcgaagcctttcncattttgcctaggattccccgatgcncgcctgtctctagccaagcctgttgatctaagaggcagggtctccaagactcanccagtagggagagctgggcgaatggatccaatctgagatagtgctcctgtgcgggttncatggtnacngccacacccnccccgctggngacagatgtcatgcgggtcacctcactccagggctgaggatgagaccttaaac

SEQ ID NO: 3174 - DNA, 459 bp, Homo sapiens
  misc_feature (1)...(459): n = A,T,C or G
actgagggaacagcggcaggtactgtggcctgagcctactgcgcctgctcctcttcaaactgcttctgctcgatgngctcctgacctgcagccacctncgcctccatgtgctggcgggccagcacctccagncaccaccctcacgcaagtccctgcctcccacccacagaatttggacatagttatgagtctctgagcttanatcttacccacccctctgagcccagggtggtggtgatgctggacactactgctccctggggccaggaanaacaaagcccaggctgtgaggaagccagctgggcccagaactcacgatcccccctcagtgctccttgntcaaagngggggtttctttttgctttttctgnatgggatctgcctcttgnaaatggagctatcctatcagaaactgggctcttgnctctcctatcagactgagactttgggaagaaaagg

SEQ ID NO: 3175 - DNA, 215 bp, Homo sapiens
  misc_feature (1)...(215): n = A,T,C or G
actgagttacaggagaatgctgctcaagcagggtgacctgagtcatgaaggtggaaagagagaaccgactctgaaatagtcctcggactgtcacacacatgctgcgacctgtgtgatcccacatacgtgcatccaacaatcattaaaataaagtgagccaggcagnggnggcacacncctttaatccagcacttgggaggatttctgagttgagg

SEQ ID NO: 3176 - DNA, 446 bp, Homo sapiens
  misc_feature (1)...(446): n = A,T,C or G
gtggggtctttccaaggtgatgaagaagtacggnaaaagcggcnggctgatctgtgacnacgtgacgtggacctgtgtgactgcctggagaagaactgtctgggatgcttctacccgtgccccaagtgcaactccaacaagtgtgggccggagtgccgctgcaaccgccgctgggtctatgatgccatcgtcaccgagtccggnnangcacttatnncccngnctttnagtgcntntgnctaggagattttantnntagaataanagactngattnacctttgttgctcngatatagagatactttttattntctttgtcaaaggaagcccangaagaaaagggtttttagtactgccaaggaggccggaggatnangcaanagctnnaaaagacnnattnacaaccgtggaagagcttnanaactntgacttggaagttaagccc

SEQ ID NO: 3177 - DNA, 374 bp, Homo sapiens
  misc_feature (1)...(374): n = A,T,C or G
tgagctctcttcgccgaatgncatccagggaaattccctgggaacatctggctccaatatgatctattacctggttgtaggcgtgacagtcagtgctggtggatattacacttacaaggctttaacatcaaagcaagtgagacgtacagaacatgtagctgaaccgaaagaacaaacaaaggcggagttgcaaccacttccaggtgaaaaggaagagcatgtggcagaagccgagcaagtgtgttcagagcctggagacactgctgtaaaggaagctgaatcggtagatgctgaggaagtcccagaggctgcagttgtgcttccagaagagtctcaggcctccgccccctccgaggtccctgccgaagctgccg

SEQ ID NO: 3178 - DNA, 536 bp, Homo sapiens
  misc_feature (1)...(536): n = A,T,C or G
cagagccagaccacaccttagctccacagccgctttgaatttatggatgcagttagctatggtgtttactctccctgcccctctgtattgttaacctcccctcccccaagctggactccccttgaangagctctttgtttcccccttagttgtagcttttatcagacagcagtgggggtcananggtttgagtggcangcttcgcangcagtctggtgactgactgtcttggtgggtttaaagaaaacagagagggctgaagcacccggggagatgcgtccccacgcccctgtaactgagaaacaataccactcaatattccaaccggctggggctggancgatggctcanaagttcaaaatgcttgctgcccttgcagaagacctgagtttggagtcncacctaagttgggcactctcaaccacctgtaattccactccanaagatctgaaaccctcttctggcctcctcaggcactgcactcncatgcncntaatttaaaataaaataataaatctntaaatgcgttcggtccc

SEQ ID NO: 3179 - DNA, 400 bp, Homo sapiens
  misc_feature (1)...(400): n = A,T,C or G
tgaggtgaggtttaatgatttacatcgaccaaggacccgcagcctcggtctctcgaatcggatccgacatcatccaacacttcagtgttagaattgcaagcatgcgctctcccgacctgggcaggcacttcgaaaaaatgatgactaaagacacaccgtgaagtaccaagcgaaantnanagtccttatgggacagtgactcatcacagtctaattccatnctggccaccaagcaataatgcacatttctaactggaagtcaagcaaacaccaacactttcacacttgngcccatttctgacgagttacgnnnagtgggnaccaacacttgcacttagccttgcctcagcttcgagtggcacaaggtaggaccaaccacaccctaccataatgcaccaag

SEQ ID NO: 3180 - DNA, 388 bp, Homo sapiens
  misc_feature (1)...(388): n = A,T,C or G
gggtctttaggagtatcttgctggttatgtaagcgacctcgggagaaattatcctgacccanatcggaggatgcggtagtgcttcanctgcaggatttcttcgtcgttaacaccacagtgctgatgacaaagagcaagntgtaatccgcancactgccagggctgagccgggcagacagaaaatcgtcatttgctgctcacaggcttgttaggttacagcctctgcttcgttctgtggtcttggcttttcttcctatacaatgacggcgctgcaagtgagctcagaaatgcttggtttgaaagccatttgcctgtgattgtttttgaagactaaagaagtatttatgctcgattaaaaaaatactgctcacgaacaaaatgaaaaaaa

SEQ ID NO: 3181 - DNA, 338 bp, Homo sapiens
  misc_feature (1)...(338): n = A,T,C or G
tgggggaagtacaggnncctcccagacagaaacngagcccaagtcttnccacacctggntcctatggagacctggagaccggtccccaggagctaccagatgagattttactggggtgaagacctgaggctataccatgggcacacaggacacgtgtggttaccatactctggctattccatattataaccattccaaagtgtgctaggtgatgattttattaagtccagtgataggaaagactgggaacactcaagacatttatttagtaaaacagtgctctgtcctagagggttaaggcacatgtggtaattaaaaaactcaaaggctcaaaaaaa

SEQ ID NO: 3182 - DNA, 424 bp, Homo sapiens
  misc_feature (1)...(424): n = A,T,C or G
cactgagttttagaagtaagtttgttagaggctcatctgtccgaagcagcatgcctggcgaaaccagcacagcgagaagcgttgctcttcctccatcagttctatatccctggacagaatgccatcggaaatcttggngaagatactttcttacttggatgcggngaccttggngtgcattggatgtgtgagcanacgcttttatcattnggctgatgacaatcttatttgggtcaggaagtncncagctgcntttanatcaaaaagatcacgttggaaagctacttcagnggaggaaacagccacaagtctgagcttgctgtcagttngggataaagaagatggatactggaagaaagaatatattacaaagcagatctcatctgtgaaagcagccctcaccaacagcctcagtccagttaag

SEQ ID NO: 3183 - DNA, 441 bp, Homo sapiens
  misc_feature (1)...(441): n = A,T,C or G
aggcagagcgttcctccactaacttggntgaattatggaagtactggcaggacttgatgctgncagnagnggntttacaggatttcatcaggctctgcccaggaagtctctattcccagnttccaaatgagctgcctgtgtggggcagngngctggacacaaacaccctggtcttcagntgagctgaggtcttgaacccgggtgggatccggcgggtggagatntncacctacatgggcgntagatcttgtctccaggatccctggctnctgncaaagntaccgccctcacagtcccaccccacccccaggagaggtgtgtggctatcagtcatgtagctaacagcaccaagccttctnacatgcaaataatgttccccccaaactctcngttcaagccagtgatagatacctgctgtcgaaccctgaatcacccctaaat

SEQ ID NO: 3184 - DNA, 296 bp, Homo sapiens
  misc_feature (1)...(296): n = A,T,C or G
tgaggaaatattaaaaaatgaacccaccaactctctgcactcctgcttctctgaacccgccaactctctggccggggngggccactgttaccactctaggactggngccagcaggnccacaacattatgtctncacggggtcccaccanttntggtcccacattncaataaccaaatagatntgccatgctcgaagtttgataacacaatacccagtaacccagnaaactcaatgcttatagttaaccaatcagatttatatatcaataaactctcaatacactagaaaaaaaaaa

SEQ ID NO: 3185 - DNA, 272 bp, Homo sapiens
  misc_feature (1)...(272): n = A,T,C or G
ctggcggtgcatggaatccanattcgtgcggnggcangatgcttgcggctgactanatccgcgangggccggnngctccgtgcngccccnanagtgntgaccaaacgaagaacacagacantgaaaagtaagcaggctttaaacccttagntctttttgnntagctgcccttcgaanctngccttttcanagtctgcnnaagagtttcttagtnnganatctttncaatggagtattctttctgnacaatgtttaaacagcaataaatatta

SEQ ID NO: 3186 - DNA, 220 bp, Homo sapiens
  misc_feature (1)...(220): n = A,T,C or G
tgaggcagaaagttttcttgacgatagnnaactttgagtccagcctcttgccgctcaccgttcccaagtcatngggggnngatattccctcatccgcagctccaaagaattacatgcagaggaaaccgtggggttcaggggcaggggtctgtcagttgtgggttcttttactggattctcttanagatgctgagttgcaatgaagttggaggcctggaaa

SEQ ID NO: 3187 - DNA, 306 bp, Homo sapiens
  misc_feature (1)...(306): n = A,T,C or G
cctggacaacacaccatctggatccantggctngtgncacannggcctccncattaganggnngaggatagcnatncttagacattgnctganctgnnctnatggcannccttgcccaggctgnanntgnggactccttaggtgangntagaatttaccaggacaccactctcctcttttctcctttggcacccgcttggaggcccgattcctctgaagactatcttggatttcttgggaccctgcttcattctggcctcccgagatgtattgggaatataacattcttgtttagaataaaaaaaa

SEQ ID NO: 3188 - DNA, 179 bp, Homo sapiens
  misc_feature (1)...(179): n = A,T,C or G
acccaggggatgctggagaactgaaactgagtcctatgcnagatgctgagatatctttccagnccctggcttanaagntttcccanaaatccacgctactagcactggatganagatgtcnatctatctagtncttttaataaatcctacgcnggtgccttgggtttccacagcataaa

SEQ ID NO: 3189 - DNA, 323 bp, Homo sapiens
  misc_feature (1)...(323): n = A,T,C or G
agccatcgtctccagcccaagagatcactcttgcattgtgacaccatgcaatgcttncgtggcctctcctggncttcacttcacagagaaatgcaccaaagaacttnttgtantattctggctgaatcctgccgcttctggttcttgccaattccgcagaatcgtacgttcctgctggatccagcgctgctactgattcccgtgtggngtttgctattggactggaccgctggtatcctgacaaccgaagagctngngttgcccaaaaaactaaaatgncctacagactcccttttcctattaacctttcttccccaccccca

SEQ ID NO: 3190 - DNA, 189 bp, Homo sapiens
  misc_feature (1)...(189): n = A,T,C or G
ataaggcgccaggataggccagggagggacccncatnttaagtcggatctnancctnagnctgggcgcacgagtntgccggctnatcgaagcnggtggctccctgcacaacccaagaagcggctggatcgnagagcactctngatctnagcacccctcggagacttnaggcncacattgcacgtggcac

SEQ ID NO: 3191 - DNA, 442 bp, Homo sapiens
  misc_feature (1)...(442): n = A,T,C or G
tgagtggcatacctggngagcaatactaaggtagnatggnccgntactacaaattctatttatgaacaatgctatctcaaagcannaccaccaagnaagtngaggagtttgtntcaaacttaggttaaacgatttgaggaacagctataaanangaccgntggaatngacttccttcagncttttaccccagccgtccagngttatgttggaagaggaccatnangtggaagaatcatgtgccgttaaaaacaacaaggaagcttttagngtngnaggaagtgtcctgnattttactaatttttgccttgatnaantggggcaaccgntactaaatgaaaaccctcagcttacggaaggatgggaaatacccaagtatcctacatngtgaatgaagatcttttatacatcttgccactaagtncacctttaaaaaaaaagaa

SEQ ID NO: 3192 - DNA, 391 bp, Homo sapiens
  misc_feature (1)...(391): n = A,T,C or G
ctgggggcctgggcaaaggcagccntgagcaagtgccaggtgctcctgnctctaccactgcnctcctgnagactacctttnaccataacgacttngatgctgagagaaatgctgtgactagcanccattttggagttgactgggatgtgttctaaagtttgaatgccaaagacaccacagagggcaccatctctacatctgagggacccaaatggactccactggaagttgnccactcactgntggggagggcactgcagctcctggtccctggttttccactttacatttcctatttgaagtaatgcatatatcatacaatttgatacattttttgattattctaatttacagaataaaaatacagaatttcttatcatcaaaaaaaaaa

SEQ ID NO: 3193 - DNA, 350 bp, Homo sapiens
  misc_feature (1)...(350): n = A,T,C or G
aactgagcatggaccatnaacatcaacaangcctgctgcngcaggaagaatcnacacggcctctngaggtggcatggaccacggacgtctttnaaggagacttanatccacaaaacggatcactcatctcacacnatcttgttnagagtcagngggngcagctgggccngtntgtntggnggcaggacctgtgngaaanccaggctgctgcacagcactctgcccttanctgccctgnnaacagcctaggnacnaccatcctatntgcngcacaagggcngtgaggtaaccctggatcttatncccacagcagggcgagcagccagagaagctccagctgctgtaatgta

SEQ ID NO: 3194 - DNA, 178 bp, Homo sapiens
  misc_feature (1)...(178): n = A,T,C or G
ttgtcaagatcaagaagaacaaggatnatgtgcatntcaangntcanttgnannnggtacctttacaccctggttatnacanacaatgaaaaggcagaggaagctngaagcnttccctacccccgggtttggcagngnangatctcgtaatgaaccagccctctgcagtgtgactatt

SEQ ID NO: 3195 - DNA, 155 bp, Homo sapiens
  misc_feature (1)...(155): n = A,T,C or G
ggaattcaaaggctctgcaacagatntttgacgagcagcattcnaagagttaatgcttctggcctagganatggctcgccagataaaagaacagcgctcttcacattcctgtgttcactcacaacattagaaataaaaattaattatgagggagg

SEQ ID NO: 3196 - DNA, 202 bp, Homo sapiens
  misc_feature (1)...(202): n = A,T,C or G
aacacagaccgacccaacaatgaacagtttcaagggacaccagaatgggtgacttgttacgatactgtantggtgcttcagggaaggaagagacagggaggacccaagctgcagttccagaattacaaactgagttcaatgacactagccctctagcaagaggcagggatgaggagtgtgcataaagtgggggtcagcactt

SEQ ID NO: 3197 - DNA, 298 bp, Homo sapiens
ttgtggggagcgtggattcttctacacacccatgtcccgccgcgaagtggaggacccacaaggtcaggttgatggctcagaaaacaagacattcacagatagaggatgaggatccctgaaactcttgtgaagacagaagataaagaacaacacaaagctgactttggacctccatatgtgtgctgtgaaatactcacaaccctcacagattgattaaagaagtatcacctagcacaccatgaatgcttgcaggctggactgtcaatcaaataaaaatagttagacatataaaaaaaaa

SEQ ID NO: 3198 - DNA, 192 bp, Homo sapiens
  misc_feature (1)...(192): n = A,T,C or G
ttgtggggagcgtggattcttctacacacccatgtcccgccgcgaagtggaggacccacaagntnctgntttctgacctgcttgagttccatgcagtnanctacctttggtcatgaacgcncattgctgccnatcnggacncgtgggtancaccatntgncntnccgtgnnacannaaccatattggatacc

SEQ ID NO: 3199 - DNA, 150 bp, Homo sapiens
  misc_feature (1)...(150): n = A,T,C or G
tggggagcgtggattcttctacacacccatgtcccgccgcgaagtggaggacccacaagantgaattctaccctgtgtaagtnagtgaccctggctgagctttgtggacngagcaccgtgacaccggggcagatcctagagacaggtaga

SEQ ID NO: 3200 - DNA, 125 bp, Homo sapiens
  misc_feature (1)...(125): n = A,T,C or G
ttgtggggagccgtggattcttctacacacccatgtcccgccgcgaagtggaggacccacaaggntcacaactaccnngatctnnntangcataggncnntcntaanctgttctaaccttgacta

SEQ ID NO: 3201 - DNA, 537 bp, Homo sapiens
  misc_feature (1)...(537): n = A,T,C or G
ttgtggggagcgtggattcttctacacacccatgtcccgccgcgaagtggaggacccacaagggccnagcttgacnctgagnngacgantgggaccagatacttttcaanccntnngaatgcagntagctnagaataacccgctccatcgnntaactnagangcnccngcncttgctnnctntnctntgtcangaagnannaggaccnagaacnaccacttncccaaaggangtcttcnnntttgagaccnannnngtaancngaaacangaanctccnangacctccacacggcgggcggaagacaggcgctctagcatcgaatgtagccctgagccggaactcgggaactctatgaccaactgggacttccgtttccgcccccctgacgacgaggcgacgggttantgcagcgagtgcattctgttcctggttagctctgagcgaagcttcctggagggccgnactcnagcctctgtgccgagctggggtccctgcctgacgccggntgccatgggagatcaagccaggtccttt

SEQ ID NO: 3202 - DNA, 156 bp, Homo sapiens
gtggggagcgtggattcttctaacacccatgtcccgccgcgaagtggaggacccacaaggtgatgtcccagtgtattggccttggatcctgacgcggctgcggctgctattcatcttgttgttgtcaaatttcatttaactgcaaattaaaaaaaa

SEQ ID NO: 3203 - DNA, 299 bp, Homo sapiens
  misc_feature (1)...(299): n = A,T,C or G
ttgtggggagcgtggattcttctacacacccatgtcccgccgcgaagtggaggacccacaagggcttcatnggacctgngaactgcccccttgnntctgtgatcccagnccanagacagcctttcnagaannactgtngcaantgcacanangaannatcccacatccnaaccagnctgctgaggaaattcaaaatagtgaccgtgaccggaagaacccatgtgcttttagtctcctttttacttttgaatcatttcccaagtttctttgataaaaacgtggtaaaacatacaaaaaaa

SEQ ID NO: 3204 - DNA, 239 bp, Homo sapiens
  misc_feature (1)...(239): n = A,T,C or G
ttgtggggagcgtggattcttctacacacccatgtcccgccgcgaagtggaggacccacaagggtcaccatgnctacagggtgngtaacgccgaagaaggctnccacnccgnaaanttgttgntnaacagngcgaatcatatacacagggtgnattttttaccggacaagcttanancaganctgtttncgntccnaaaagatggngtcgnttttgccctcantaagagatggtaggtc

SEQ ID NO: 3205 - DNA, 381 bp, Homo sapiens
  misc_feature (1)...(381): n = A,T,C or G
gtggggagcgtggattcttctacacacccatgtcccgccgcgaagtggaggacccacaagggactcgncatctgantgcananangctggcctgnaacgccannnatnanaactttgaanactgtgagntcggcccacctggagtgctggnnttacaagatgngagctgtncctgnncgtgctcgctcnatcntntnntnnatttanngntctagngctgtcaatacgacntgctactccatgngcagtgaanggagctctctnntngagccatcttcttttttcacttcccactaccaaaactatccttgattgtcaagggtcattanaaaaggcaaacacccaaatattaagtatatagattgactagtaaaaaaaaaa

SEQ ID NO: 3206 - DNA, 167 bp, Homo sapiens
  misc_feature (1)...(167): n = A,T,C or G
tggggagcgtggattcttctacacacccatgtcccgccgcgaagtggaggacccacaaggggggnnatttcacactgacttcntccancngagctcnganacgnacctggngntcnctctaccncancagacctccagctngccgtgcnaactgcttcttcatccca

SEQ ID NO: 3207 - DNA, 316 bp, Homo sapiens
  misc_feature (1)...(316): n = A,T,C or G
gagccgtggattcttctcacacccatgtcccgccgcgaagtggaggacccacaagattctcacntncncnctgattggcacgccgatcagacgaacaccggnttaangngcncactanggatanggataaggaccgggaaaagtctaagcatagcnacngngaacataatagattctgnanngaatcncagagagaaagagaatannccccccactgcnggcccntcccctctgcattgagacaaacctttggangganacaaggaaagacgaaaggaggaaaagattagagctgctggggatgcaaaaaaaaaaa

SEQ ID NO: 3208 - DNA, 141 bp, Homo sapiens
  misc_feature (1)...(141): n = A,T,C or G
gagccgtggattcttctcacacccatgtcccgccgcgaagtggaggacccacaagggaggcanatngnagctgccctggaggaccctganccctgnntgntcaggacgctngagcntgntggtcattccattctaacacgc

SEQ ID NO: 3209 - DNA, 224 bp, Homo sapiens
  misc_feature (1)...(224): n = A,T,C or G
gagcgtggattcttctaacacccatgtcccgccgngaagtggaggacccacaaggngtacatctgtgcttancctgagaccatngtattggatncccttcccaccttgaggannntggtggaccagttanaagcgtnacattgttnatcagtgctgcaccagcatactnctccctctaccanntggagaactnctgcaantatgacccaccactacccagccta

SEQ ID NO: 3210 - DNA, 119 bp, Homo sapiens
  misc_feature (1)...(119): n = A,T,C or G
gtggggagcgtggcttcttctacacacccatgtcccgccgcgaagtggaggacccacaagaccttgatgtgaaantncaagannantncaaactttgntcttcactggaccctgggaga

SEQ ID NO: 3211 - DNA, 402 bp, Homo sapiens
  misc_feature (1)...(402): n = A,T,C or G
gtggggagcgtggcttcttctacacacccatgtcccgccgcgaagtggaggacccacaagantcacnannngcagcatnttactatgacntcctgggngtntntnncagngcctgcgattaanagcttaccaaagcntacagtgaagcttgccctgaagnttcacccngacnagaactgcnctcctggancaacanangccttcaanggantaancattgcctntgctatnctnntcnantgatgnaagagantgcnttatgatgaatatgganatgagcaggtgantttcactgnccctcgagccagatcttatcattattacaaagactttgaagctgacatctntccanaagaattatttaatgtgttcttcggaggacatttcccttcaggaaatatt

SEQ ID NO: 3212 - DNA, 130 bp, Homo sapiens
  misc_feature (1)...(130): n = A,T,C or G
gagcgtggattcttctcacacccatgtcccgccgcgaagtggaggacccacaaganccacgacaggaanctnagtanctacctgtatgtgctcatccgttacgnnatgtgctgtaagactgggaggactc

SEQ ID NO: 3213 - DNA, 469 bp, Homo sapiens
  misc_feature (1)...(469): n = A,T,C or G
ttcttctcacacccatgtcccgccgcgaagtggaggacccacaagggncccnctngnagctgnagtgncaggnccgngagcatagagacntncttaccttgnnnctgcnngtgncccantgcaancctgnncttggataacaantgctgaccagcatctngctcctctctactatactggagaacnantncttctngacngacccntacntactntacccntcnncnttgaatggaannctntnaatgngcanatgccaatcacaaaagaannnggggaagtcatggggaaagttctggaggaagccaggtttgntgtggcctttcaccgaggcaatgaaggacacagctcaggtgcagnggccacatgcaactgggaagatctttgtccagagtcaaggaattgcaacaataccaaatgccaactttaactggaacaccttcctgcagcaatcagggagtggccctat

SEQ ID NO: 3214 - DNA, 141 bp, Homo sapiens
  misc_feature (1)...(141): n = A,T,C or G
gagccgtggattcttctcacacccatgtcccgccgcgaagtggaggacccacaaggnngaacatgactgccttctttanaangctncgaactcatnggnnnaaaacnactggctgngctcngnntgctgacatggcggagg

SEQ ID NO: 3215 - DNA, 128 bp, Homo sapiens
  misc_feature (1)...(128): n = A,T,C or G
gagccgtggattcttctcacacccatgtcccgccgngaagtggaggacccacaagggtcncanatgcagctgnannggcagcgcnagacaacaggntacacttnactatcttgcacatctgcgagggg

SEQ ID NO: 3216 - DNA, 323 bp, Homo sapiens
  misc_feature (1)...(323): n = A,T,C or G
actgagtgtggcctcttcctgtgtgatgctggaggaggcaacctgatgatcctctgacaactgttcacgtcagcactaaggaagcagatggcaatgtcacaggcacaggattatgaatgcagaagccatcatgtcgatgagcaggagcccaggattccggggtcgagtaccagnnnccttnacctngggantnnaagnctngnanntggtgnagatnnctnatnntcnttananntgaccnnagggctgnacanatggctcatatggttgngagcactgtttgcccttgcgaaggtcctgagttcataatggccagcaaccat

SEQ ID NO: 3217 - DNA, 392 bp, Homo sapiens
tgagtgagattggggtcccacggccagctgctactccgcgtcaaccgggcgtcgctgagtcagggtctccccgaagcctaccgcgtgcaccgagcgctgctcctgctgacgccgacgacccgcccctgggacatcactaggcccctgaagcgtgcgctcagcctccagggaccccgtgctcccgcattacgcctgcgcctgacgccgcctccggacctggctatgctgccctctggcggcgcacagctggaactgcgcttacgggtagccgccggcagggggcgccgaagcgcgcatgcgcacccaagagactcgtgcccactgggtccggggcgctgctgtcacctggagactgtgcaggcaactcttgaagacttgggctggagcgaccc

SEQ ID NO: 3218 - DNA, 129 bp, Homo sapiens
gactgaggttccccccccaggcaggagtaaggctccaggggagtccaccgctgtcccctcggggccactgcccccctgccccagccaagccaatgcacccagaaaataaactgaccaatcatggcaaaa

SEQ ID NO: 3219 - DNA, 398 bp, Homo sapiens
  misc_feature (1)...(398): n = A,T,C or G
agaccattaccctaaggaggagactctgcanaccttggctgaggagctnatactgtggtaagaagtcatcagaccctggttcttcactcagcatcaaagagagatgaggcncagatggtttttgatgggctacaagggttggataacacactgtcactactgtacaacaagaaggaccgccaggcagaagaactccaaggagtgctctcagaatgaccctggattccccgaagcgttggaagccttgaagaggctcaagctctcttctgggtaccaaagcagagatggcatgtcataggatttctgacttttcaacgtctttgttggggcaggggtctgtctatggaagaaggtacattaataataaagcttgcattcatagaatcgaaaaaaaaaaa

SEQ ID NO: 3220 - DNA, 397 bp, Homo sapiens
  misc_feature (1)...(397): n = A,T,C or G
gactgaggtattcataaaaagtctgcctgggacgaggctggccaggaaaattacaaagggcatttgtggcaagttgaaattaccaacacccagacatcaaatgacaaaattattgaagtaagtaaaatatttaacatgagctcttaccatatttcatatctaaacatatattgttggaaattacttcataaggnttcttctagaacttaacccaaatcaagaagacagctcaacgngtaacaggacttgtgctccttatggtggataataaagaaaagcccggaaacntgttntctgancttcgngtgtgcgctctggtgtgcctatgcacacacacacaaacagaaatgtaatttggaaaataaaagaagtaccttaggcctgggaaaaaaaaaaa

SEQ ID NO: 3221 - DNA, 216 bp, Homo sapiens
  misc_feature (1)...(216): n = A,T,C or G
cttcgagtgtgcttcctttanggtattacctatttcacgaatacttgatgatatgataggtttgctcttcacttgaaatcaagtgtttgactttttacaaaagtgaaaccttacccgagaggagtttcctatctctggatggcagntgattcactgtaagngntctgnggcctaactagngagagatgcttnanataaactaagtttttatgagtt

SEQ ID NO: 3222 - DNA, 417 bp, Homo sapiens
  misc_feature (1)...(417): n = A,T,C or G
ccagggcataaggctagggttgaacanagggtttncatncnnnntgnccntaacggatnttggaancctcactcttttacctgnnnanggatgaccagaaactggagaanangatatgtcaggaagccaactcactgtgtgacttgatacttacatacgacggggagtcccgagatctgtctacgctcatcttcaagtcagtaatcaatatcatctgtaccatctgcttcaacatctcttttgagaacaaggatccgatactgactaccatacagacctttacagagggtattgnnggatgtcctgggccacagcgatctggtggacatattcccgtggntgaagatttttcccaataaaaacttggaaatgataaaggaacacactaaaattcgagaaaaaacactgggtgaaatg

SEQ ID NO: 3223 - DNA, 232 bp, Homo sapiens
  misc_feature (1)...(232): n = A,T,C or G
tgactagtccgaaacttgaatatttacctgtttttaaaatgncaagttactgctacccatgggcanaagctcgnaggcctcatgangcctggngttnctgcaaagacgnnngccnacacttnctcagagctctggctagccttnctaaaanagtctggnaagttgaaagtcccnaacctgggnggacncagncangnctggccanacntacagagcttgccccatatgatga

SEQ ID NO: 3224 - DNA, 257 bp, Homo sapiens
  misc_feature (1)...(257): n = A,T,C or G
aactgaggtgcagagntagtcctcgataatngcttgtgtgtcnatggggaaatctnaaggcctgaatgacacctttaaggaactggagtttcttancatggccaacagtggagttgagttccttggcccggcttcccancttgaataaactccggaagttggaacttagtgacaatataatttctggaggcttggaagtcctggcagagaaatgtccaaatcttacctacctcaatctgagtggaaacaaaataaaa

SEQ ID NO: 3225 - DNA, 130 bp, Homo sapiens
  misc_feature (1)...(130): n = A,T,C or G
gtacaaaggtgaaacagctaanaaacctataggaatctcanagctactagnctacnttnnggnagaacatacaatcagaagaccatcttcanaantnctagaagtcatgggaaggaacttttattctgca

SEQ ID NO: 3226 - DNA, 164 bp, Homo sapiens
  misc_feature (1)...(164): n = A,T,C or G
tgagctatcccatctgtcnaagggaganttacacagagcaatggtaaagatctggtcatctacctcgagaagaggcgatactacgggaatcaatctaatttataaaaccactcacctatgtacacagacgctggctgaatcatgcacatctgaacgagggacga

SEQ ID NO: 3227 - DNA, 329 bp, Homo sapiens
  misc_feature (1)...(329): n = A,T,C or G
cttataaaagctgttggccctgctgctgttatccaaaaacagttttccggagaaacttttgaagaaagaattgattgctctgggaaatgcgtnttgccaggtttgntggacgcacacacacatccggtgtggncngggtgaaagagtccacgantttgcnatgaangtaactggaacggacggcagcaaatcaatacagccgcaaacaggggaatgtctntactagtgattgcntaannggccaacctatgccacatatctttttaatgggtttatctttacttggcttaataaagaacacaactgaccattaaacttaaaaaaaaaaa

SEQ ID NO: 3228 - DNA, 382 bp, Homo sapiens
  misc_feature (1)...(382): n = A,T,C or G
ctgagggtggtcctggactttgtgagcacctctcaagttctgtgatcggatactgggtagcccactgttccagaggtctacacatgcactcactgtgacggnaaggaacctccttccatggggccactctaccttgtgcctgaaaatccatttgagaagtaggcctgcattctgcaaagctctgcacttgtttccaaattacatttaataaagaaattgcaggtacttcagctgaaattgaaggagagagggaaggctggaacatcagcagcctactggggctttcatacttacttttcaccttagatgaccctctaagagttttggattttggctgagctaaaataaacttctccaagtgttactgtgaggaaaaaaaaaa

SEQ ID NO: 3229 - DNA, 103 bp, Homo sapiens
gaactgaggttcccagcagtctaccttgtgaaatgttttaggctaagaagagtccagcaacagctaactgagagacctgaataaaagggtaaattaaaaaaaa

SEQ ID NO: 3230 - DNA, 427 bp, Homo sapiens
  misc_feature (1)...(427): n = A,T,C or G
tgagaaatggaggcaaacgaccattttaactttactggccttcctcctgcaccagctgcctcaggactgaaaccctntccttcctcgggggagggcctctacactaacgggtctcccatgaacttcccccagcaagggaaaagtttgaatggggatgtgaatgttaatggcttatctactgtatctcacactactacttcagggattttgaactctgctccccactcctctagcacctcacacctccatcaccctaacgtggcctacgactgtctttggaactactcacagtacccatctgccaatcctggcaacaacctcaaggacccaccccttctttctcagttccctgggggacaatacccgctcaacggtatccttgggggcaaccgacaaccttcatccccaagtcacaacactaatctaa

SEQ ID NO: 3231 - DNA, 227 bp, Homo sapiens
  misc_feature (1)...(227): n = A,T,C or G
tgctatcaattatctactgagacccagngaacngntaaaatcacngtcaaagagaanagggtggagagaggaggagggggaanagcttanttgggccacaggaagacaggaagcantcatttacttataaaagaagtcggcattcattcagcgggctgcctttgtcttcttccaagcctgnctgaaaatgncatacttcggcctggagactttcaacgaaaaaaaaa

SEQ ID NO: 3232 - DNA, 508 bp, Homo sapiens
  misc_feature (1)...(508): n = A,T,C or G
gactgaggaaaatactacatagctaccatggccttgatcaccgcctccacagcccttaccatcatggtgatgaatatccacttctgtggggcggaagcccggccagtaccacactgggccaaggtggtcatcctgaaatacatgtccaggatcttgtttgtctacnatgtgggtgagagctgccttagcccccgtcacagccaggagccagaacaaatcacgaaggtttatggcaaacttccagggtccaacctgaaagcatccagaaacaaagacctttccagaaagaaggaactgagaaaactcctaaagaatgacctagggtaccagggtgggatcccccagaatactgacagctactgtgcacgctatgaagcactgaccaaaaatattgaatacattgccaaatgtctcaaggaccacaaggccaccaactccaagggcagcgagtggaanaaggtcgccaaggtcatanaccgtttcttcatgtggattttcttcgctatgg

SEQ ID NO: 3233 - DNA, 408 bp, Homo sapiens
  misc_feature (1)...(408): n = A,T,C or G
cggtttccaacttggacgaggagagtcgatggactgtccactacacggcaccatggcatcagcaagagaatgtgttccttcccgccacaagacccccctgtgttgaggacctgcaccgccaagccaagctcaacctcaaatcagtgctgagggaatgtgacaagctgaggcaagatggctgccgaagttctcagtactattctcagggacccacctttgcagccggctccagcccctgcgacgattatcaagatgaagacacagaagcagaccgaaagngctctctctcttcatctgaagaanaaagatttatcggaatnaggagacctanaaaccccancttaaggngactttctccgaccttcatactcagacaaactgggaccaagtccctgccgctgccaacac

SEQ ID NO: 3234 - DNA, 199 bp, Homo sapiens
  misc_feature (1)...(199): n = A,T,C or G
tacagtcagaggagggctgctgtngctgtcaggatggctgnggancangactttgcccanctgtgcnggntggncacacagccctnccactcccactgtggtcaacaatacctancngaagcacacagnactcccaggccctgctccggggccngctggctntncgagacagtgnggatcctctttgacgtttccctgg

SEQ ID NO: 3235 - DNA, 246 bp, Homo sapiens
  misc_feature (1)...(246): n = A,T,C or G
tgcaggacagacagggggnagangtcnaggcnncaagtctactggncatnttggctctaacctgacggcgcagtcatatgcaagaaggacaacggaaggttaagttctggcagagcacaatggcccttaatgcctttaatctcaggcaggcagagctctgggagtttgaagccagcctgagctacagaccaggacagccagggctatatagtgagacctgtcttgagaaaagcaaaagaaaataaa

SEQ ID NO: 3236 - DNA, 248 bp, Homo sapiens
  misc_feature (1)...(248): n = A,T,C or G
gaaccccagctccctccccggtggcggcgccgactcttactggacgancttggctggatccccatggttgncatanaccancgcccgcacccgngacggctcaaagagagcggagtaggaggatgtggtccggccgtggcggnaccaagcctcgaggagacccgcaagctgaggtgcccgggctcgcgccccttgtcactcgntggctgaccaacatgctggttccagcactggcagaatccggcgac

SEQ ID NO: 3237 - DNA, 162 bp, Homo sapiens
  misc_feature (1)...(162): n = A,T,C or G
tcttgttcatggccaggncncaagacgcgggacaagcctgtatgtnagatgccntnttnnngaaacctgagctntgcctagaggantggccttcagtgcatcggatganagcaangagancgaangggactggccatgcaccccggggtcgtcaaaacaata

SEQ ID NO: 3238 - DNA, 214 bp, Homo sapiens
  misc_feature (1)...(214): n = A,T,C or G
gactgaggaacaagatcaccaangacctgngttctttgtggttgngaaccnattatttanccacatntgagcctcagttntccctgntgggaaactggnactaanacttcntatctactgggctgctcctaagctaggtagaatngtcacgangaagganagcatgacagaacaggaggactatntgtcagattccttcattaatgttcaagaa

SEQ ID NO: 3239 - DNA, 244 bp, Homo sapiens
  misc_feature (1)...(244): n = A,T,C or G
gctgaggtagtagcctgggcacaggccatanttacttcttgnggaactctcaaangncgnacaggaagcntggctnggctccataaaccttaccaccgagcaatacagtgccttcccttcggcatttgcaagtctgcagnanggacctntcgtgcttccttcctctcttaccctgggccactcctggaaagngaggntactcttcccagttttgaggtatgctgacatacctcaaagtattaaa

SEQ ID NO: 3240 - DNA, 188 bp, Homo sapiens
  misc_feature (1)...(188): n = A,T,C or G
tacttttgttttttttacttggcttnggcaatngcaaagcaatggctggnaaaatntgcggggttcacncangaatttcggggacttgagagttcctcagnttaataannagtaangcttgttttcagtttcagacctcccgaagctacctaagtttgaaaaagcttgagctcagtgaaaaaaaaaaa

SEQ ID NO: 3241 - DNA, 412 bp, Homo sapiens
  misc_feature (1)...(412): n = A,T,C or G
tccgtggtgctttatctggctgtgncactcatggaccccaggcgtatgngactactcagncccatntctcacaggngagcccanggaggaacaaggcagccatggttnactcangccgncccactccggcgctgaanacactgtntggtgctgnagcccctgcgtgcccggcactgtcgtgattgccgccgctgagttcgncgctatgatcaccactgtncctggatggagaactgtgtgggtgaacncanccacccgctctttgtggnctacctgncactgcagctggnagttctgctgngnggnctgtgcctggcatggtatggccttcagttgttacagccctggnggatgnggctccggtacactgggctgctgatcaccaccttcctgctgctgtccttcttctcga

SEQ ID NO: 3242 - DNA, 499 bp, Homo sapiens
  misc_feature (1)...(499): n = A,T,C or G
aactgaggagctgagagccctgaccccagcactcctgaaccctctctcatggcctcagacatctggctcagcatgggactcaaacaacagaaattaagcatactgaaaccctaaggaggatgtgtcatactacactctacacaactacaaagtgtcaaggaaagccgggcctctggggctggcatctgtacacctttctacaaaccgattctttgtggctgcagaatggctattacctttctggggctagtgctcaggttacaagcttctgtgaaggatatcttcaaactccttgagactgcacctgggtgccgtggataacagcagcaggaacctgatggctacaggtctggaagagcagctgtcaggatcgggagaagggatgctggtggccaacacagtcctgcgttggaaagagcctagttttctcggctttgtggggtgtggtccatgctgntcctctttagtatctgcgaccatctgtgctggcaggtgcttc

SEQ ID NO: 3243 - DNA, 273 bp, Homo sapiens
  misc_feature (1)...(273): n = A,T,C or G
ttttctcttccatccntctctcccctnaggctctttccctctnnttctnggncccccnnnncntgcctggnttntcctgcnncntcaagttcatgcaccntgcagactntgaangctgaaggtaacggccagtgacggnttccatgggttttgtcttcgnggacatgctttattattttcaaggccatggatttactactgaaactttttcttgattgccctttaacaatctcttcctcaaaataatatataattataagtaaaacaaaaaaa

SEQ ID NO: 3244 - DNA, 558 bp, Homo sapiens
  misc_feature (1)...(558): n = A,T,C or G
ggtaccctccgtcgaatattcctcccagcatcagaacgaatgtggtangacaagacttggaatggaggactggtcccagaatgggtctgtttgggatgtcanancagaataacttctctgtgggcttgactgccttttgggtgggtgctggagatcaaacccagagcctccaagactcactctcccgtccgcccgccaagatnccacctcatccgtcaaggggctgattttgactanctggttcagtgctgtcatttacagaacccttgtgtgtgactttcagtcagttccctccttccagcaccccggaaaattgggcacagtagaaaatgtnatctcagcagttgataagcaagtggatcanaagctcggaatcaccttcggctacacaaaggagtnagaaggncagcctgggcttcatgaaacccggtcccaggaatctangagaagaacaagncaanacgaaacccnaacctgttctctccgttctgtncactttatccctcagtcctcagaatctcccgantctgaaccccttccaagcatgtccatttcctg

SEQ ID NO: 3245 - DNA, 468 bp, Homo sapiens
  misc_feature (1)...(468): n = A,T,C or G
gaactgagagaatggttttctgaaagcaataggactgcagatgttaaactgaatttctgactgtccaggaggaaccggcatggaacccgcatggtacttcctgctgcgctcttcacacttgccaggccaaggttctgttacctcaagatgggggttagtttcaagagtagctggagggcttgtttcctgagtcatcttcttgtgagcccatgctctgtgaaggagaaagcaaatagtgngtttgtgaccaactctatcaagaggactcttgtgaaagcagcatgccagctccccagcctgtctctgcaggaactaccacagaacaacaacaggcaacctgggccttccctaagcacacttaaaggagttcctgaacatatcttaaaaggtatttcttgggaatttatgggaactgggtttcaaggacaatgagcaacttcacatttaataaatgaaccaagttcttgg

SEQ ID NO: 3246 - DNA, 751 bp, Homo sapiens
  misc_feature (1)...(751): n = A,T,C or G
gtggaagaagacagcgattcagagacctatggagaagagaatgacgagcaaggaaatttttctagaagaaagattgtctccaactgggatcgctatcaagatactgaaaaggaggtcaatggtgaaagtggagaatctcagcggggcacagacttcagtgtcctcctgagctctgcaggggactccttttcacagttccgatttgctgangagaaagaatgggatggngaaacttcatgtncaaaacagaattnancactctacgtggacagtgagtcactggttcgagcccttgagcagctgcctcttgcagtccggcttaatgttgcttcanaattgatccagaccacaattcctttagaacttncacaggtgaaaccaaggagaaacgatgatggcaaggagctgggcatgcatttaaggggacccatctctgagctcagatctgctgctggtgcttgccccaggtctctgggcanaggcagtctaaggcaaagccctttanaaaggtttgcagaaagcacctaccccaacacagtcagtggcagaccacctggaagaagaactanatatgtttgcttgcatttanaatncacctgtgccaagaangaaggcaatatnntctccagacccaggacattcttngggnaccnaggaacccatnaaaaaagnattgggncnanggtnntncccaaggaanggaaaacnagggtnccttggaaaaaaanccctttttttgtggaaccccccg

SEQ ID NO: 3247 - DNA, 389 bp, Homo sapiens
  misc_feature (1)...(389): n = A,T,C or G
cactgaggtaaccatgatgatgacaaaggatactgctgngactctcactccctttgaggacaccctgactcggatgctttttggccggcggcagcagcagcagttntnatcnagtgaaaagaaaactgaagtcaaaccgtcttccaatggttctgcctcaagtgcatcgaagcggggagcagagccttcgggtggtgctaagagacacgccaagaaagaagactgagggtcgccctgggcgtcggaggcaggaggaggagttacttctctcagagtgtgcccgtggttctgtgaatgatgtgagagagcgcttatgtgtaagggtggaggagacaaaagaggaagtgctttggttcagggacacccgctcgcttttctgggccgtaact

SEQ ID NO: 3248 - DNA, 190 bp, Homo sapiens
  misc_feature (1)...(190): n = A,T,C or G
gaactgaggagtcttactatatcgctcctgctgttctccacctncggngatcaaactgnccacgtcagcttccggaatcgaagggaanatagatgtgtgtgngctacccacctggcnagccctaaagttgagatgtngaaactgtgggtgcactgaatgnctgttctactaaagagtgttgttcttctga

SEQ ID NO: 3249 - DNA, 337 bp, Homo sapiens
  misc_feature (1)...(337): n = A,T,C or G
tcatcatcatcatcangangtggataaaagtatgggncgacccaagtnaaataaacaggtatntaggatnagaccttnangnggnagcnggggtngnccncaccccntgccagcaagcccccggnacccaagacccccatcatcgaagaagaacagaacaactcagcaaacacccagaagcatccttccagaaaaagngaactgaagaggttctataccattggttaaantaccggcaanagtcccnacataatgaagagcaancanatgcaaatatttttctcacactcttccgnaatctgcttntacactgaaaaagagcctgctgaattaggaa

SEQ ID NO: 3250 - DNA, 234 bp, Homo sapiens
gtcaattatggaaagggctgatgaacgctaacagcgcttcccactcccccagctgaaactatagagggtcagaagccccaaactgctgagctctgcacacagtgggaggagtggctgtcgggaggggaagcagagaatggctcgccaagagaccctggcttctaacaaccagctcaagagaagttcctagtgattaaattaataaactgagctcaacaaattgaaaaaaaaaaa

SEQ ID NO: 3251 - DNA, 151 bp, Homo sapiens
  misc_feature (1)...(151): n = A,T,C or G
tctccatcaaagcatctaacacaancctaaatcctaatagccctgccttacatcctgttgctgagatgccatgtgatttactgtgatttgtgttctccatttctccaatgagtgataatcacagtttgttcagcttgcaggaaaaaaaaaa

SEQ ID NO: 3252 - DNA, 733 bp, Homo sapiens
  misc_feature (1)...(733): n = A,T,C or G
gacaggacagtgcttgtttaangctatatntctgctgtctgagcagcaacaggtcttcgagatcaacatgatgttcataatcccaagatgttgccatttatgttctcagaagcaagcagaggcatgatggtcagtgacagtaatgtcactgtgttaaatgttgctatgcagtttggatttttctaatgtagtgtaggtagaacatatgtgttctgtatgaattaaactcttaagttacaccttgtataatccatgcaatgtgttatgcaattaccattttaagtattgtagctttctttgtatgtgaggataaaggtgtttgtcataaaatgttttgaacatttccccaaagttccaaattataaaaccacaacgttagaacttatttatgaacaatggttgtagtttcatgcttttaaaatgcttaattattcaattaacaccgtttgtgttataatatatataaaactgacatgtagaagtgtttgtccagaacatttcttaaatgtatactgtctttanaanagtttaatatagcatgtcttttgcaacatactaacttttgtgttggtgcgancaatattgtgtagtcattttgaaaggagtcatttcaatgaatgtcanattgttttgaaagttaatgaacattttaaatgccaactgttncggttttaaaaacaaactgtccgaancttgaactaaaattaaaancgaantattcaaagggaataac

SEQ ID NO: 3253 - DNA, 231 bp, Homo sapiens
gactgagatatacatgtctgagtccacggcggctgaatccaagtctgcatgtgaaggaggagggacaggaccattcgatctccagccttccccctactccctcaatagcttcggccacaccctccctccctaagacgtgtgccccaagctgctctttggggctctgcagttaagggctcacctgagaactgataggagaatgaagaagatgacgagttggggggtaagagt

SEQ ID NO: 3254 - DNA, 297 bp, Homo sapiens
  misc_feature (1)...(297): n = A,T,C or G
tgaggtgctccctgactcgcagcatctgttaatccagcctaagcccacagtcctggctaggtcctgacacatgtgacaagtgcatgacatctggtggctgcagaatgaagatataacggtcaaacagaagcctgggagtgttggtggctgtgaagtggtccaaactaaggatggttttacattatgtgaagcanaagaacagagtgtgcaatcagatcaagcctcacctgcagccaggactgcctcttgattctgcaacttcagctgataaactgcttttatctttaaaaaaaaaaa

SEQ ID NO: 3255 - DNA, 185 bp, Homo sapiens
attttacagtgaggaaactcggtgtatgcaggatagggaactctacatggaccacagaaggcaaaagcctgctgctttcctgtgcagggtggagtgtactaagttagcatcctgtgatgtacttgccccagccagcaacagcagagaagcacacaggtaacacagctccttgaagttggaccctc

SEQ ID NO: 3256 - DNA, 282 bp, Homo sapiens
gactgagggaacaactgaggctgagccagaccttgactttgctgccctaaggagattatcaagggtggagccatcctccctagatcactctattgttcagccactgtcccgttcctcttcaagatactgctacctgccgaagcaattccggagactacaccctgtcctacacgtggtcacctgcagctgggctccaagaatgaattggcgagaatgggcctccccctcctttataagcgcatttgccattaaacatttgagccttgatctgaaaaaaaaaaa

SEQ ID NO: 3257 - DNA, 222 bp, Homo sapiens
  misc_feature (1)...(222): n = A,T,C or G
actgaggcccaggaagtgaggccggtngaagcaccnagcgccaaggantnttccactcctactgggtaaaagcacncggnctactcggagcacaggaaaaagcccagaaaacctggcccagcccaggcctntctccactccctgcttgaccatgcaggaaaacagacacaantatcttcngggcatttcacccngnggattaaacatagaagaacaaacccg

SEQ ID NO: 3258 - DNA, 287 bp, Homo sapiens
  misc_feature (1)...(287): n = A,T,C or G
gactgaggtgggtttgggctgaggtagancngggcagcggncatnatnacttnttgtggaactctcanaggnnggncaggangnacaggtggccaccatnnccaccaggaggcannncaggagagcncngatnacncncacnatgatnactgnggcgnacaccaggtccacctgctttnctggatcttcggggtctgttggagacaggccagngtctgagatacacgcccaaatccttccctgatcctccccagaccccattgctaccccacgtatcctcatcatgg

SEQ ID NO: 3259 - DNA, 294 bp, Homo sapiens
  misc_feature (1)...(294): n = A,T,C or G
tgtgtggaggagaaatatacactgctgaggtcactcattgttcanagactgtcagtgtaggaacatggaccattctaataggganaaggatgatagacaacggacaactaaaaccatggnacaaaggaatacacactgttngagaccatntggcacttnaacatcctctggggtnctcatggngggacccaacttnagggttggcaagaanatagggtgtgggaacttcggngagctcagattaggnaanaatctctacaccaatgaatatgtaaccattaaactggaaccaat

SEQ ID NO: 3260 - DNA, 434 bp, Homo sapiens
  misc_feature (1)...(434): n = A,T,C or G
gctgtggattcccagtttacagaggtgaaggtgtaaacgagtgtcggaatccagcacactgcaggnggagctcaaatgtacagctttgcttagctgtcagaaggaaggaggctctcccagaatcccatgccctgaagcccagggtcatatcctctatcttcacaaaacattgttgctagattggactttctaatcatcttaatagtggcaactactgaaatttgcctcgtttcttatctaaggaataatgctgtcagcatgtctgcatactccatgctctccgacagaattgtcatggccaaggaactgatcaaaagagcagaatcactttctcggtcccgaaaaggtggcatagaaggtggcgcaaagctgtgcagcaaactgaaggcagaactcaaattcttgcagaaaatagaggctgggaaaaaaaaaaa

SEQ ID NO: 3261 - DNA, 353 bp, Homo sapiens
  misc_feature (1)...(353): n = A,T,C or G
agaactgagtgaatgctgaccagtgagatgccagcctgcgtgtgaagatcctacagcagaagtgcatggccagtgacacaagaacttgcgagagatgccagtccgcctgtgaagatcctgcagcaggagtgcatagccagtgacacaagacgtgcgaatgaaaactagatgtgaccatccagaaaaagcatagacaaaaaaatgcagtcttagtactgggatgtttgagatggggtctatctacatgtctctagctgtccctatcaggacagcatctggtgtggcctgcagagttgattcctgtacttttttttttttgggggctgtttntaaatggattgttttgacaatcc

SEQ ID NO: 3262 - DNA, 335 bp, Homo sapiens
  misc_feature (1)...(335): n = A,T,C or G
actcgccttctatggccagaaccttcnttgncagtgtnctctggngcgnctggntntttattnancctagatggcactaganggaagacaggccgaaancgaantcccaggcttcctttatgntaanagcgatnaggcctttacaagtctantattgngagtctccagagagancagagctctcctacngactagcttaaacctggagtcagcgagatnctaactgctgtcagangaatgggcccaaggagtcnngaaagaanccctncagggnggattgntgtgaagtgggtgatgactatanaagctcgaggccaggagctgatgttattcaa

SEQ ID NO: 3263 - DNA, 256 bp, Homo sapiens
  misc_feature (1)...(256): n = A,T,C or G
gggcacagattgctattacaccaaggggacagagctattgagtgggagaagtggaatttgaataagccagggngcacagattagtgaggaacctaactggaacctaccaactagaaactcaacatacagggaggacaatgaagaaaccttcaaagaaaccagttcctgttgccctaatctaacaagtttcaacaaagaagtacactgaaactttactgctatgcaataaagcacagcaaactgggaaaaaaaaaaa

SEQ ID NO: 3264 - DNA, 136 bp, Homo sapiens
  misc_feature (1)...(136): n = A,T,C or G
acggtggcttgtgctgganagatggctcaaccnttaagantgccgacngctcttnnaanggncctgagtnnaaatcctaacaaccacgtggtggctnatanccacccataacnaaatctgatgccattttctggag

SEQ ID NO: 3265 - DNA, 226 bp, Homo sapiens
  misc_feature (1)...(226): n = A,T,C or G
actgagaaaggtttaactgaggagggaagaccaccctgcctatgtgaggccaccatacccatgggctggggtcctggattgaatcaaatggaggaagcaagctgagcatgaacattgaccttcctgactgcagatatcantgcgatagctgtntcctgcttcttctactatgcctcccccttccatgatggactgtnctctgaaactgngagccaaaatatacact

SEQ ID NO: 3266 - DNA, 497 bp, Homo sapiens
  misc_feature (1)...(497): n = A,T,C or G
actgagacacatgtcggaggcgaggnttatggccagagacgtcatcaagactgttccacacgaccaggtcccccaacctccagtggcctctgagactcccagcatgaaggagcctgtggctggggaaaaccttagtcctgtgagagacgtggacctcatggagtgcgtggaaggcagaaaccaggtggccttgaggctggcctgcatcggcgatgagatggacctgtgtctgcggagcccccgtctggtccagctgcctgggattgctatacacagactcgctgtcacctacagccggacaggtgtcagaggtattttcaggagcttgattcgaagcctcaccaacctcagggaaaacatctggtcctggagagtcttgactcctggcgcctgggtgtcacctgaccaggaccctgggcagctgtttccaatggtgctgctggtcttcttgctgctgggtggggcctggtatttgcagcttcagtgaagtgcagctt

SEQ ID NO: 3267 - DNA, 211 bp, Homo sapiens
  misc_feature (1)...(211): n = A,T,C or G
aatggccccggcgccgaaagaagattgcctgttagttctttatcaatatcacggcngnacngagaagagaagctacagtgtgccttttgtttggttttaccaatgtgaagcagttttcagaaaggagnactaccacaggagcctcgttccaataaaaagagtgcgtgcataccttttaaagataagcacgtgatctagatcgaaaaaaaaa

SEQ ID NO: 3268 - DNA, 222 bp, Homo sapiens
aagctgggtgtgttggcacatgccttttaatcccagccatcaggaggcagaagcagactggatctccaggagttcaagaccagcctgatctgcatttggagttccagtgctgaatattaacccaaggccttgtgcatatgaggcaaacactccactacggtatacatttagcctatactttgaatttttagaatagagatgttcaaactgcaaaaaaaaaaa

SEQ ID NO: 3269 - DNA, 389 bp, Homo sapiens
tgagattgtctagccgctcgatggggagtccagaagaccgcctgtgtgtgtcagatccccacctctctgtagcaagagaagtaactacagcgccttcacagtcatgatgatgaaactggtattaactgagtggcccttatggatttttaactctaactcacagtgagccagcaagccatatgtttacagttcaaccaaaaacccttcgtgttgctgcacttcttgtgagaggttgagacgcctgttggtacagagtggaatacaagagttacttgccgtggaacacacctgcagcagagcgagaagacgtcttaatttatcattggagagagatgatagtattatttatataggtagaataaatatatatataaatatatatattttgg

SEQ ID NO: 3270 - DNA, 117 bp, Homo sapiens
  misc_feature (1)...(117): n = A,T,C or G
aactgagagcatactgccctgctggtagttcatacccattcctgancaacactggtttttgccatggaatccttagatccagcggggnntgggcagtnggccactgttcaaaattaa

SEQ ID NO: 3271 - DNA, 276 bp, Homo sapiens
  misc_feature (1)...(276): n = A,T,C or G
cttacagaggggatcttnggaagctgtgcggataacaanngcncganggagaaaacaaagatcanaatcagttctccttccaagcactcagccaggccaagccagaggtgactctgcanagagtcacaaccccttggtctcctgcgtcagatgccacctctcctaagagagaactcacccaagatgtgnctgagtccaagggaagtccgngnccctcananacagaancgccttcactggncanctcannggaaccttttcttgctaatcaagata

SEQ ID NO: 3272 - DNA, 427 bp, Homo sapiens
  misc_feature (1)...(427): n = A,T,C or G
actgaggatttgaaagtattcttgagggctgtttggacctgcgttattaaaagatctcagtttatttaaagagtgtgaccctgaaagcatttctgattgggccgtntgatgaaaattgtctgttctgttgcttgaanagagataaagnaaagggacatttagtcggtctggatgaaccagcttccggagctgggcaagaagctttgcttaagcaagagcacgcaaaaatcattcgactccagagacaagcagaagagttcctcaatgcagtcttttatagaaaaggttggtttcagtggcaaacgacacagctgtctgcttgtcatatattaatttccttaatatagatgtcattttaagttactcttcaaatatttctgtattcctttatcacattaaatttggaataacgttaagacaaaaaaaa

SEQ ID NO: 3273 - DNA, 585 bp, Homo sapiens
  misc_feature (1)...(585): n = A,T,C or G
tatctgttcccaggatgagtaacagccaccctcttcgcccctttactgcagtgggggaaatcgatcatgtgcacattttgtctgagcatattggtgccttgttgattggtgaagaatatggtgatgtcacgtttgttgtggaaaagaagcgctttcctgcccacagggtaattttagcagcgaggtgccaatattttcgagcattactgtatggcgggatgcgagagtcgcagcccgaagcagagatccctctccaagacaccacggccgaggctttcacgatgctcctcagatatatctacacggggccgggcgacgctcactgatgagaaggaggaggtgctgctggacttcctgagcctggctcacaaatatggatttccagagctggaggactctacttctgagtatctctgcaccatactgaacattcagaatgtctgtatgacctttgatgttgccagnctctactcgcttnccaagttaaactttgtatgtgctgcatgttcatggacagaaatgctcaggaggtgctggccagcgacggctttctctccctgtccaagacagcacctcctgaatatc

SEQ ID NO: 3274 - DNA, 456 bp, Homo sapiens
  misc_feature (1)...(456): n = A,T,C or G
gactgaggtcttgaataccatcatggccaaaccttacgaatttaactggcagaaggaagtgccctctttcttgcaagaaggagcagtttttgacagatacgaagaggaatcttttgtgtttgagcccaactgcctcttcaaagtagatgaattcggcttcttcctgacgtggaagagtgaaggcaaggaaggacaagtgctagaatgttccctcatcaacagtattcgccaagcagccataccaaaggatcccaaaatcctggctgctctcgaagctgttggaaaatctgaaaatgatctggaagggcggatattgngtgtctgcancggcacggatctggtgaatatcggcttcacttacatggtggctgaaaatccagaagtaactaangaatgctgaacccactgggtggtacctnccctgagcaagctaagggagcaagccaggaagctgag

SEQ ID NO: 3275 - DNA, 199 bp, Homo sapiens
gactgagtatcgttgatctgatgggcccagttcattatcagcttcaactgtcctgtgtcctgaggctttcgaacattccttgtcctgtaaggaggtgacagaggcagactgtgacccggaagacacttgtgattacctgtaacaaacgttgatgttgaaactaataaagaattgttgttttttaagtcaaaaaaaaaaa

SEQ ID NO: 3276 - DNA, 183 bp, Homo sapiens
cctcgagaacccaggcaaccacagacagacatcagagccctgtctcgcactgcttgatttcctcttgatctcctttggcagacactcaaatgcaatatgagattcagtgatgtaactaggctgcggattgtatacaactcactctttaatcactaaaagtaagaaaacataacagaaaaaaaa

SEQ ID NO: 3277 - DNA, 617 bp, Homo sapiens
  misc_feature (1)...(617): n = A,T,C or G
gcagactgagctcttacttctggggacgaaggaaaatccaggattaaagacaatccaggccaccctgtctaggcaagggatcgaccatgagtatctttcgtcagtggatttaaagcaacgctttccaaacattcggttcaccaggggagaagtggggctcttggacaagactggaggtgtcctctatgcagacaaggccctcagagccctccagcatataatttgtcagctaggaggcactgtgtgtgatggagagaaggtaggncttntnctancnggactatnngncacagtgaaaaccaccttgaagagctaccaagccaacagcttggtcatcactgctggtccctggaccaaccggcttctgcatcctctggggattgagttgcctctccagacccttaggatcaatgtgtgttactggcgagagaaggtccctgggagctatggngtatcacaagcttttccatgcatcctgggtctggatctggcccccaccacatctatggactggcagcatncgantacccggggctgatgaagatctgnttnaccatggtgacnatgtggacccanangaaccgggactgncccaaaaccnttttaagaccttccca

SEQ ID NO: 3278 - DNA, 489 bp, Homo sapiens
aactgagagcgctgatacaaggcatgcttgagaagtgtgaccgcttcctctggtcgcagcaggcctagttggggatctactttgaccaagtggaatcctgctctcgaccctgcagaggtctttggcacagaagggaagaggacaccccaaaacatgctgctgcagctgctgatgtctcatcaccgcctggccagcccttggcttttgtggctctgtgacctcagagtttctcaaggaagcagtgggctgaccttcactggaagcagcctggaggtgctccctgctgggtcggattctttgtgtacaccatgaatcagggaattggtttctactgatgcagatctgtagggagcagaagctttggtacaggaagacataactaatattgtaaactggagttcaatactttttcttactgagttaggacctggaacaatgacatcattcctgttggcttatgtaataaatactgaagatccaaactagaga

SEQ ID NO: 3279 - DNA, 172 bp, Homo sapiens
  misc_feature (1)...(172): n = A,T,C or G
ggtaaaatgccaatctcaggcatcatgaccacaccagnagaagaactacaaggaaggctttttcacctttgacaccacggacgcccagnctgatctgtttttgcacataattaaatgtattcttctacgtttatggctttgagattnaaaanacngtgcttgtgctttgcaa

SEQ ID NO: 3280 - DNA, 103 bp, Homo sapiens
  misc_feature (1)...(103): n = A,T,C or G
tactggaccagagattattcgcccggnaattgnntncnctcccccttgcttcataactgagtgtngcaacagtaaaattggagctttgatcagaaaaaaaaaa

SEQ ID NO: 3281 - DNA, 196 bp, Homo sapiens
  misc_feature (1)...(196): n = A,T,C or G
gaactgaggctctataaaggacatgggaaggnaggangcnngntntctttgcctgcttgctctcactggcattagagcctactgaggcagggtgtccagccgcngtactaaagagaagttgagacatccggccttgtggactatacagctactggattcttggaccttccattggnntggagccattggtggacaa

SEQ ID NO: 3282 - DNA, 366 bp, Homo sapiens
  misc_feature (1)...(366): n = A,T,C or G
gaactgagacacccgaggactttacagtaagaggccaagggaaatgctgagtaagcaggaagcggttgacttgcccaaggtcaccaacaccaaatggagccggtggaagtcaaccaaaccttgttctgctgcctgtgactcccagcctccagttccacctgtgcgggttggagggttgggaggaacttagcctgtaagactctggcgagccttagcttacctgagtgttcacccctgagtgaacaacgcatgcagaaagcaagagggatttattgttccaatgcattggggtcaccctacatccaaaggagaggcggngacctctcgcagcctgtttggtaagtgtttatacactttttagagcag

SEQ ID NO: 3283 - DNA, 419 bp, Homo sapiens
  misc_feature (1)...(419): n = A,T,C or G
cctgacaattgacaagatggcntctttattgattgatcaganaccaattggggacaaggaccttcagcgtttggacacacagattcacaattttgggggcccggattacttcaaagcattagatcccatccccaacacatgtgttcaccccccagtgtgtagtaggtttgnctntgaaggcccaggatttttatggtcactcntagcagagtcaaagtntgagaaagaganngctaangatatgccctctgagccttcnggggaaataagggcaaagtctcaagtccttttattatttttttttccgagacaggnnattctatgnatagcnctgggtgtccctggaactcattttatangccatggnttggcctcnaactcaanaaatccgcttacctgtggctgcaagtgcagggcat

SEQ ID NO: 3284 - DNA, 464 bp, Homo sapiens
  misc_feature (1)...(464): n = A,T,C or G
tttgagccttgtatgttggttttgaagttgagttcagaggaggagagaatctatggctgtttaaagaaattatgagtcgaggatcacaagttcacatttttttgggtgctccagttgctccactgaaaacnacagtatcacagggaacagcttccttaatgtccactgccaacgcctgggaaaaagtccnactctcctataaacagcattccttgtntctgaaggctggggatcaggagtttaaaaatctggaagactgtcaagtcccccaaaggtcttggccctccangccttcttantggtgacgttttgatgacttctgtgaggaggtctgctcaggtggaanaggactttaaacattctgcttcggaagcacagagtgtgaaatccccacgttaacctgagtgatatgactagtggacaaatgtgtggccttggggacggagttcaccatttaccccgaa

SEQ ID NO: 3285 - DNA, 440 bp, Homo sapiens
  misc_feature (1)...(440): n = A,T,C or G
tgaccaagtatggtggctcacacttatactctgagcactcaagaggatgggcaacggaattgctgacccgagaggacagcctcgccgtgagttccagagatgatccagcagttgaggtcccagcagaggagacttctaggtgaaccgccacagaaaggatggaaggtcactttacaccatgttgatctgctgaaactgtgactccagtgctcctgatcctgcttgcttgctgtttatgctttgctgcaccagccactgcccccttactatctgggtaccccgcagcagtcgatgcaacagccttgtcatcaagttctcagtggctggcaagaaggccaattggatagccactcttctcttntcggacttaacacagaactgntggttnccaaacaaggacctttgcattggaaataaaggaccctcagccctttcccatc

SEQ ID NO: 3286 - DNA, 203 bp, Homo sapiens
  misc_feature (1)...(203): n = A,T,C or G
ctctgctgagccctgnctccttaagcaggccngagntcgacagaactcggttgcttngctgttangctttggagggaacnnagctgactgatgaggctgactttgaactcaagagatttgctgaccccagtnctgctggaattaaaggcctgatctacattcgcctggacctaannattttcatgatcactatgcttcaagat

SEQ ID NO: 3287 - DNA, 236 bp, Homo sapiens
  misc_feature (1)...(236): n = A,T,C or G
ctgccccaccccttcttcatgtcccactgnnctagaatcagatctgcatggctatgacatgctcgccgttttaaagatgcaaagatttcatgctagatcattagaatgtatctggacttcgttaggacaagttctttgctagtaaccagtcacgtgctagcaattgaggtgtgttaacctgtatattgntgcctatgagtaattttccataatctttaataaaggcttcctgtgtc

SEQ ID NO: 3288 - DNA, 116 bp, Homo sapiens
  misc_feature (1)...(116): n = A,T,C or G
gagccacacactgtgcacctttntactgaaccaganattattcngcgngaatctngntnccatcccccttcnttcataactgagtgtggagncagtgnnaattggagctttgatca

SEQ ID NO: 3289 - DNA, 119 bp, Homo sapiens
  misc_feature (1)...(119): n = A,T,C or G
acactgtgcgcctttatactgtgccagagatcntncggcngggaatcggntncnntnccncttgcttcataactgagtgtngcaacagtaaaattggagctttgatcagaaaaaaaaaa

SEQ ID NO: 3290 - DNA, 127 bp, Homo sapiens
  misc_feature (1)...(127): n = A,T,C or G
ggggagccacacactgtgcaccttnntactggaccngagattatncncgccggnaatctggnttcntnnccgcttgcttcataactgagngtggcaacagtgaaatnggagctttgatcaagaaaaa

SEQ ID NO: 3291 - DNA, 173 bp, Homo sapiens
  misc_feature (1)...(173): n = A,T,C or G
gcaaaggctcatacacnctgcaagtcttnatggncttatcaccancctttccagcaggttctantgccttgacctggggtaggaccgagngaaggangaagagggtaaaagggcacagacttccccanctntgccctaaataaaataacaatgctgattcaatgaaaaaaaaa

SEQ ID NO: 3292 - DNA, 443 bp, Homo sapiens
  misc_feature (1)...(443): n = A,T,C or G
ctaccctccggcctctacttccacgtgctgggatcgtgggcatgtgccgccttgtatcnnctcatgtcactttgtaccactgcgtctagctgagttctgctgtcttgcctgagctgaggatgtgaaaaccctaaagaggaagtgcactgtaaaggactttccttttgagggcctcatcattctagaaggttccttcccgctgacctcctcccccagggcagctcccctgcggttgtgggtgtgcacctggtttctacccacgttgctggccagtttgcctaatcctgtggcactgttatgaaatcctaattacaattaagaaaaaagtctgagcaaaacccaagatacctccggattttatcatgatgctcattaatctcatcttcaaacttaatgtcaagtgtttgtcttttgctttttgaaaaaattttttcttaacatac

SEQ ID NO: 3293 - DNA, 118 bp, Homo sapiens
  misc_feature (1)...(118): n = A,T,C or G
acaccttttaacccgacatgggaacgttcatgataggacgggnaaaatgtgtcaccctggagaagtggggaacaggacttattccagcaagggaggagagctttgtcgtgctcgatgg

SEQ ID NO: 3294 - DNA, 157 bp, Homo sapiens
acctgaggtccctgttcgggcgccaaaatgttgcggccgccagcagctcgcaacgtgaacggtttgactgagaaggccgctcgagctgtaagagaggaatctagacggggcaaaagaagaaatgtagccaagacagttactctgacgaaaaaaaaaa

SEQ ID NO: 3295 - DNA, 260 bp, Homo sapiens
  misc_feature (1)...(260): n = A,T,C or G
cctacagagtgagttccaggacagccntnnntatnctganaanccnnntcggnacttccagttctnctatgaaggatgttgatggtttagncncggggaacaagtgnccctttccagttttgtccagaccctgacgaggacataatggttgttatcaataaggaaaaggtanaagagatggaacagctcantgagganctttaccaacaaaaccaggagctgaaagacaagtacnctgacctccatgagcagctacagac

SEQ ID NO: 3296 - DNA, 418 bp, Homo sapiens
  misc_feature (1)...(418): n = A,T,C or G
gactgagaagagaggtggctcgcctgcatgtctgttgtctgcatgtctacttccttgttctgtcactcggctgcacnttgacctcaccaagntgaaagncgacatgtgcatggcagccatcttgtctgctaactgaactccngcacaacaagatggaggtggctggccttcatgtgacctattgtttcaggtcgctttggtttctcccttcaccgggttctagtggcccggtttgcaagtgcagaatggtgacgaggctccctaaagcagcctcgaccatccacagacagcctcacgtttttctcctactttttccttatgcttttaaacggcagactctgaattggncaanctaaaattnttttggggggaaaattaaaatttttaatttaaaaangccttaattaaatgaaaaaaa

SEQ ID NO: 3297 - DNA, 518 bp, Homo sapiens
  misc_feature (1)...(518): n = A,T,C or G
aactgagatgtcaagggcctctacacacatctggaagttcaggcatggcccttgagaaccgcgtactcacgcgctccaggaggcngactgcggcaggattgccccggaaagctgtcgcagtgaacgcatctgctatgaagattgggagcttcattttcctcgctggctctgtctgagggctccctgccctgctcggagcccgtttcacttccagctgttaagaagaagaaaaagttaatgttttactccatgtatagacgtagttaatagttaccagatagaaagtcattgactccaacatactttgcacctcaagatgtgcacaccccgacttttcaaagcctctgcatttaatttgttttaaaatactaactgaaatgaaacagttttaacctttggctatttgcccctctaccccaacagaactccccaacataatcaccctctgtcccagagtagctgacactagctgtgacagtgactttaataaaattcatgagacatctgaaaaaaaaaaa

SEQ ID NO: 3298 - DNA, 134 bp, Homo sapiens
  misc_feature (1)...(134): n = A,T,C or G
gacagtcactttactgtttaaagcgntncaaacccaaancggcaatganggaggtggtctctgccnactgntgatnaacaggaagagaccgtgaattgaggccaccaagaacttgcagctgaacaagatggaga

SEQ ID NO: 3299 - DNA, 204 bp, Homo sapiens
  misc_feature (1)...(204): n = A,T,C or G
tgcttgcttctatctgcngancccatntgaagactgatgctgtccgngtgcacatccggnatgganctctggtccctgggcttaaggagcttnccggtggggcnacaggtgcagccaccagaggaaggggattancgatagctctcanagaggagagcaggctgtcctgggcattttaaaaaatggcattttgaaaaaaaaaaa

SEQ ID NO: 3300 - DNA, 103 bp, Homo sapiens
  misc_feature (1)...(103): n = A,T,C or G
cgtggcaaccatactgggggcctcntatancntgtnaaggaagantataatcgntttgatcttgaactttacnatgaagctgtaaaaattatcaaaaaaaaaa

SEQ ID NO: 3301 - DNA, 505 bp, Homo sapiens
  misc_feature (1)...(505): n = A,T,C or G
ccctgaaatgctctggaagctatggaccagcaagaccttccagannagagagaacgatggcagtggtgagcgataaggccctaggtaggctaaagtgccacggacaagatagcattgaattgggcatctgtggctggctgacttataaattgacctgataagcaggtccttggactgggatgaaagaggtgtcactgagagattaatctgatggccttgggctacccgtccccggatctttctgggagcagtgtgaagatggggtgcttttagaaagttttatgttaccaactgggcccaacctttcaatcttggattttaaaaaccccattgaaacccctttgccacaggaatggcatgtagctttcttagagtttatctttccttacacataagaattcagagccttagggagatggctcagtgggtaagggcactgnccccaagccagaggacctgagttcgagtccctgggacctgcaatagtggaagattcctataagtt

SEQ ID NO: 3302 - DNA, 170 bp, Homo sapiens
  misc_feature (1)...(170): n = A,T,C or G
gctcttggagctggccaatgaggtggactatgcaccctcattaatggctcggattatcctggagagatttctacaggggcatgaanngactccaccaagactggagaaatgctactctcaagtgcaaaaatgaattctaccaatgttcgtatgagaaaaggaaaaagaaa

SEQ ID NO: 3303 - DNA, 123 bp, Homo sapiens
gaactgaggaatttgatcagtttgatgaaatttcattgatgtcaactctccagctgtctgtgccttaccaaaagctgtttgcctccaagacaacaaacagcccgtgtgatccaaaaaaaaaaa

SEQ ID NO: 3304 - DNA, 452 bp, Homo sapiens
  misc_feature (1)...(452): n = A,T,C or G
ggtgtaaggtctcctgnagccacatctatgnagttacatgaagatnnggncctgtnaacatgggttctgggaactgaacccaggtcctctgaaaggacntcgagngctctnaaccactganccatctctgcagnctaaccccatcccttggaggctgaagcaaagcatagttcaatgactcgtgcgacctggctcttgattgggcctaaggaaaagccgactgtaagccgggaagcatctctggcaagaacaaggaaggattaagcacgtctgtggttgtgcgcagggatcacaaggtgctcctgcagtgggaagagccaccactaggggcgctccaagtcttgtattttctaccttgaaaactcgtttccctgtggctgcctccaaatccaacggagatgaatggcttttagtttacctagctgatttaataaactttaaaaataaatgta

SEQ ID NO: 3305 - DNA, 237 bp, Homo sapiens
gaactgaggcatgtcatgaagctccgtgaagacactttcttgctcatgaagttcatgaacccttcttgcacgtaatggtgtggctttggtggcatctctgacgcaaggatggacctctccagagccaggcatgaggctagacaaggtgcttgccatcagctccaatgccccccgtgccaattcactcatcacaccagatcataaaaataaatctttaatggctttagaaaaaaaaaa

SEQ ID NO: 3306 - DNA, 343 bp, Homo sapiens
actgagttttagaatgtcctgtgacctggtatattagggagagcaaaaatggaacttgcaacactactcatgccagccacacctacgagaagagtgacccctacagagagccacacatagttctccctgagctcagtgtccaggggtaatccagagcctcgaggctgccatcgggactgtaacggacagtgaagataggatgaactgagcacaagtgacactattttctaaggcagacatagttggcccaatctttaggttaatttggatgttactttgtatttcataaatgacaataaatagtagatatatctaaattatgtttgaagcaaaaagaaaaaga

SEQ ID NO: 3307 - DNA, 262 bp, Homo sapiens
  misc_feature (1)...(262): n = A,T,C or G
aaaagagatgcagaancctgnaaaccttccaaaggagggaaaagaacagcactcannaaggaaaagaaatgatggagtttttctcttcctgagtccttangngtcagtggtacagtgtagacaaaatgatgacagccattaatgtaacctttgagaggagttgtctgtcccgcctaagccgagcagggttcatcgacctgatcttagtagtttctagaattcgcctaacactgtgtgagggtttcatgtgaaggatgtgtag

SEQ ID NO: 3308 - DNA, 428 bp, Homo sapiens
ggagaggctcctcaaggtggtatcctgctactgctccccaaggccttgaccaagcatagccccccagggctggactacactgttgaagacctggcacagtcagatttcagcctttttatgcctttcatgccccccactcccattctttctttaaatctgactagtaacttataagagggaatggattccatggtatactggctctgtcactcaccagctcagccttgtttcttccacgggcctggcacattaaggggatggccacttgcctgccaccaaccaaaccaacatggcaggaggcaaaacccccttagtttgaatggccaagtgatatattttctctaaagaaagttgccaggatcctctttgtaacttgtgacatgaatcagaataaagaattccctctgtcctgcctgcaaaaaaaaaaa

SEQ ID NO: 3309 - DNA, 201 bp, Homo sapiens
  misc_feature (1)...(201): n = A,T,C or G
ctgactgaagtgtgcaaaggggctgtcccacgaaccataaaacntcatgcccacccagatcatccctgtcaccactctagagggaacagntatttattttgctatggacaaagacaagggagggtgctagggaatgattttgtttctataaagaataaaattgtgtccgnggngtgttcccgggagacagcaggaaaaaaa

SEQ ID NO: 3310 - DNA, 356 bp, Homo sapiens
  misc_feature (1)...(356): n = A,T,C or G
gactgagacttgtatcgttgtgattatactgtttagatgaaaatgtntggtaaagcacgtgcttctaggaaaaaacctcancagctgaaaagaagtttgaaacaacagagccaatanaggaagcggatttgccngagaatgaggttggaaacacagcaaaaagaaacagaagtcatgcaaagcatctgtcctctaaagtancaggacaagcaacgtatattcatctaanacggatanaantatcatccagcacgagancaacctgncnncctcttncaanggatactgannagtatttgcnaagtatgatggagtnagtcattcttggaattttattcaacataaaaagaaaagaa

SEQ ID NO: 3311 - DNA, 105 bp, Homo sapiens
  misc_feature (1)...(105): n = A,T,C or G
gtagcttcttgtggaactctcaaaggtcggacagggggggtggntgggnccatatatctactgcctcgaatcgatgaattcgagctcggtacccggggatcgaag

SEQ ID NO: 3312 - DNA, 131 bp, Homo sapiens
tggacgctgcacctttcaggacagtgaggaaaacccttagtgtctctgcattttgctttttaagcggaagtgtatttttactgacacatgtgatgaataaagcagcttgtggttttggtgaaaaaaaaaaa

SEQ ID NO: 3313 - DNA, 303 bp, Homo sapiens
  misc_feature (1)...(303): n = A,T,C or G
gggaggagccgacggccatctctttcaccaggagaaccaagtagctcccttaacctcagcctcatgaccatgtttcagcactgtcttagacttggcttttcagactcagttctgcttcacacactggggnctgcgatcacgcgaggaagggagcttattagtaaatccgtgtggagaccacagcccacaccatcagtgagaatcagcgtgggaccacttattcctggggacacctgaacatcaacaaggcaggtgactgaccccaaggactctcagcacaacacagacagcaagaaaaaaaaa

SEQ ID NO: 3314 - DNA, 554 bp, Homo sapiens
  misc_feature (1)...(554): n = A,T,C or G
cttatcctcggaactccacttccngncaagaccanacatcttctccctnaacatnggnnncgcgnacttagggctcnacttccccngccagctnctntactntatnttanataatggcttctacatnanntcctcgacgaagngtaangtccatccccaacaggnantacattctctccnaggattncatnctnnaccattaaaatctccaatgtctnctgggaggcctctacgtctaaaatcaanatcctcttcgacacnaaccttcatgagcatgtataacttttnntncactgttcatcacttantncattctgancctcctnaaccagcacatctgccctntgctctaccatanctcggacagcattnctcaattccctcctggacacattgcccctccccaacnctgcggatgatcnccagctcatcgactactaccttntgaangaccctgtattctccaacggncnacctttganatctgaantccagagatnattcttccctttnaaggangacaactacnatccttcccaaacaaggcggccgaa

SEQ ID NO: 3315 - DNA, 243 bp, Homo sapiens
  misc_feature (1)...(243): n = A,T,C or G
gactgaggttggtgttctcaggactctttggctcaaatggttctgcctgaaccccctgagtgcttgggtctacagatgtaccctgtgtgcntggctctgctgatattggattctcaaaggaaaaccattgactttgaagagtgaagcctggatgttttatcaatgttttaatatgaaaactcaaatctatataaaatgttcacaaataggaaaataaatgtccatttacatttcaaaaaaaaa

SEQ ID NO: 3316 - DNA, 311 bp, Homo sapiens
  misc_feature (1)...(311): n = A,T,C or G
acattacagctccgcncttcntggaaagtttgctncaggtccctaacattgntgaagantnactaattngagactananctcaagcncttgctgcctggttcactcctaggtttagctnaattgcnctacacatanatatgcntagggggncatagatgcaggngcancttagcagttcaggncacttgctgtttaatcatnaagactgganctgagatggncaaccattcacaaacctataatttcancttnaanagatctaatgccctcttctggcctccttaggcaanctcatatcctcatagagata

SEQ ID NO: 3317 - DNA, 117 bp, Homo sapiens
  misc_feature (1)...(117): n = A,T,C or G
atccccaaacatacacattcagggggggatgggaacanncatggtggatgcgcctcanggccacggnccacgtctgttgcaataaatctgcagctctgcttcttgcaaaaaaaaaaa

SEQ ID NO: 3318 - DNA, 463 bp, Homo sapiens
atatgctcacacgatctgaaattcgctgctgtgaaaacagaaggaaacggtcctgtcaggagaaccagcccctgcagttccctaaggctggcacaatggaggaaggttcctctccgcctgagttcctacctcggtgatggactccgtgatggactatgatcctgacacccacaactaagatccggcaggtgcttgcagacagtgacatcttgtgggaaatctcaggaactgcaccgtggcaaatcgctgctccttttactgtggggtccttggaatacccagtcaacatcaaggaagcattcattcattcactgccttctgtgtacaaggaactgatccaagtcctggaataaagaaagcaagagagactggatggctacacggggagtgaaaaaattcccaaggattataaccttgtcattactgctcaactttaaatatattttgtgtgtgtgaaaaaaaa

SEQ ID NO: 3319 - DNA, 124 bp, Homo sapiens
  misc_feature (1)...(124): n = A,T,C or G
cttggttcccctgctctgacagatngaacnnagcntcacggtgtnggnccnnctgnctgnccatcccgttgataaattgactatgccaataaattaacattgnttcactttcgaaaaaaaaaaa

SEQ ID NO: 3320 - DNA, 278 bp, Homo sapiens
tctgccccagaggttacatcaattgaacttttaattaagttctgctgattccttgctcctgtatcttcagtgaaatgtgccttgtgctcccacacgtcatcaacctaaaaagaagtccttagtgaggataaactagtgtttcataattttgtttcctttttctctttcttcagttccttctgtattcaaggggttaaggaacccggggcaattatcttggagacgtaatttttctggatatcaatcaataaaagcaaatatgatttgaaaaaaaaaaa

SEQ ID NO: 3321 - DNA, 110 bp, Homo sapiens
  misc_feature (1)...(110): n = A,T,C or G
gaccctgcttacttggctgaactacggacaacancatatnntgtncttanaggcccttncgctgntcctaacaacncatnctgggcccgaactgtggcttccataaattc

SEQ ID NO: 3322 - DNA, 156 bp, Homo sapiens
gcacgtccgtgaagcttccgccatgttctctgggcacagctgacaggagcccctccatcatgaacacagcctctccaactatcacaaacaaaactagtttccaaagacatcttatttccttgcgctataaagtatagtggcatcagaaaaaaaaaa

SEQ ID NO: 3323 - DNA, 432 bp, Homo sapiens
  misc_feature (1)...(432): n = A,T,C or G
ataattccttaccatctttgtcanaatttggnatactgccaaaacctgtgtctgtggnaaaattttgtctccaatctttcattcaagggaacgnactacaatgnaacctacactctgttgcgcacactgtggtcttagtagnatagtatggggaagaacggnaagctcctgttgtctcttacttttgttctctaacctgttttgtaaagtcctctgatatgttgaactaattaatgtaatatcaggaaaggtttctaggatgtatatcagttgagtattcatttatgctttaccagtaacaaattagagaaagggaaagcattttgtatatttgtatggtaaggaaaatgtatattatgttagcattttcaacatttggactcgaattttaatttaattaaagctgaatttagttttggaagtaaaaaaaaa

SEQ ID NO: 3324 - DNA, 300 bp, Homo sapiens
  misc_feature (1)...(300): n = A,T,C or G
gggagaaactcactcgccaaacaacgtctcgtggtatcctgncngactctngccgcttcagcatgancctggctgctcctgctggattgcgctactgntacngantcatgntnggngntngctantgaactggnctgcttanatnctgacacggaagagtggaatgcgcccaaagcnagcacttctaataaggtccacaactccatttgcctntaaccttgctttttccctacctctggttggtgggctaaangggagggttaagaaccccaaataaagacagatgtgaaaaacctaaaa

SEQ ID NO: 3325 - DNA, 377 bp, Homo sapiens
  misc_feature (1)...(377): n = A,T,C or G
tgcatagttgaagaaggaaagcaaaatgttaatggaacgaagtccaagaaggctacatctcttttaactcagagtgggttanctngcattgctccagctgaagagcccaggagcccagaagaaaaagaccancaaggcgcacaaaaagcagaaagttacagaggaatgtgaagaagcaattccacaactggtaccaataggagagactccagataaagaaaatgtaaagatgcaagaaaatatcacagggaaaactccaaaatcgaaatctgatccaagtacacctaagggtaagaaaaggaaggccttgctggctacagagactccagaagcctncggccctggggaccttcagggaangaaggcataataaaggg

SEQ ID NO: 3326 - DNA, 318 bp, Homo sapiens
  misc_feature (1)...(318): n = A,T,C or G
aggttatcccctaccccatcattgtaacttaaactttcatgtacttgtaagtaaaatcaggtactcgnccagcttctatggnttctgtatggggnaagtcgggctgggcaggggaccnncnctacnggncggnccnanttctgacngccngtcncgtacccngtaaacagttganccantagaaaaggcctccagcactacaagtanntaancatntaggctccccnaaccaccatcaacntgtagcactctgccacccatctctccccanaaacatcacagctntaggtagcctcanccaacagtcctgtcttttgt

SEQ ID NO: 3327 - DNA, 228 bp, Homo sapiens
gctgtcaatccgctgcggcatggatcgattcaaggtgtttgccaatggcattcaccttttcaacttctcccatcggttccaagctttacgaaagataaacacgctggagatcaatggtgacctcaccttgtcctacgtccacatctgagctcctcctggggaaggaagcaaaagatccccgagttccatctaagctcctaataaaatgttgaaggggaaaaaaaaaaa

SEQ ID NO: 3328 - DNA, 162 bp, Homo sapiens
  misc_feature (1)...(162): n = A,T,C or G
tgctacctgctgggaggccctggagangctatncctgagactattnctgagactacaccctatnctgcagctgggctccaagaatgaattggcaggaatgggcctcccctccaccctttataagcgcagntgccattaaacatttgagccttgcttgatcag

SEQ ID NO: 3329 - DNA, 258 bp, Homo sapiens
  misc_feature (1)...(258): n = A,T,C or G
ttttagagtatcaataaaagactggggacatgaattacgcctgagcctggcctgacaccccaaggatgtcaaggaggatcaatgttccagagataagatgcanagtgcccgccgcctanagcctgacttntgccctnatgtcagcagatgcccgcttntttggtctttgttaaattccccctcgaccccttcctattccccgtgatgcatgctttaaaacaaggcacctcagcataataaacggagaccttgctaggc

SEQ ID NO: 3330 - DNA, 810 bp, Homo sapiens
  misc_feature (1)...(810): n = A,T,C or G
gaactgagggattgcccttctctcagatgtgtaccctgaagaaatcttggttgatctgttggccaaatatgacagtgggaaagacaagcacactcctgagaccagaatgaaggttggcgaggtcctgatgcgagttgtcagagcactgggggacatggtctcgaaataccgggaacctttgatccacaccttcctgcggggagtgagagatccagatgctgcacacagggccagcagcttagccaacctgggagagctgtgccagtgcctgcacttcctgctgggccccgtggttcatgaggtgacagcctgcctgattgctgtggctaagacagacaatgatgttcaagtgcgcagagctgcagtccatgtggttgtgctgctgcttcggggactcagccagaaagcaacggaggtgctgagcgacgtcctcagggatctctatcacttgctgaagcacgtggtgccgcttggacctngttgacgtcnncaaagcctgcatgcccagctgcccttggangagcttcgatgagatcattganggaacttcctgttcccctgccccaataagctgnagaaagaaaganttntnggtcctngccattannaccctnggtttcaccaangaacnattgggnaannaaanggcnccgngtgnaaanccntaanccnngcncaanntggnnantttggtgtanacnnnnaccnnnttccanncnaatgtgcntgnttttcnanctctngnncnttntncctttgnggtggccnnntaccncttggnaggggctnctcggcttatttaaacccctc

SEQ ID NO: 3331 - DNA, 384 bp, Homo sapiens
  misc_feature (1)...(384): n = A,T,C or G
cccccaatggatggacttttaagnctgaaaaactgnangaaaccctnnngtgtctgcataagcaactcaananctgttttgctctgccgcataagcaagttacagcagcaaacaagtagttggtcataacataacacnnaantgnanactgccgtaggtgtgtgtggggttgggggcatgtcactgagtccaggttactgggantttatcttctagggactggantcaaaaagacaaagagctantgggtaccaagctggatgcctatcataaaatggagttacagtacnatcacgttggggaccccncagatacacaagtgcttgctctttaccgcttgaaacccctcacacctcaatcntantatacaaaaaggatttttgg

SEQ ID NO: 3332 - DNA, 101 bp, Homo sapiens
  misc_feature (1)...(101): n = A,T,C or G
gaggctctcccttccggaggggcaagtgtttccggaccttcccaaagttcttgaagtgatcttttcataagtaaattctggngaactttcaaaaaaaaaaa

SEQ ID NO: 3333 - DNA, 254 bp, Homo sapiens
agaactgaggtgtgtgggtgttttcccttcatgtatgtctctgccccacatgtattcagtgtccatggagcccagaggagggtgatggattctctgaaactggaggaaaagtgacaaatgtgttgtcacaagaagagctagtaaggaattactgagccaaaatcaattaccaacgcgtctcaggaaaacaccatgtgttagacagcctgctgcagataacttggttttgataaactcaaagtccaactcataat

SEQ ID NO: 3334 - DNA, 324 bp, Homo sapiens
  misc_feature (1)...(324): n = A,T,C or G
ctgaagtaagagcctgggcaggaggccatanttacttnttgttggaactctcaaaggncggacagagaagcatggngtggntccatatatctactgcctcnaatccgatgaatttttttctcggtnacccgnggatcagaanttcctattcggaagttcctattctctanaaaantataggaacttttcnacctgcaagcatgcaancttntacctcgacgtcnaanaagggactgangnctngnataaaagggnaaagantcggatgcngtgtcccaaccnatgganngtttcntangggggannaaataacccgggccggca

SEQ ID NO: 3335 - DNA, 381 bp, Homo sapiens
  misc_feature (1)...(381): n = A,T,C or G
ccctgggggaaccccccccgatgatnnngaggatgacacctcccncccccttgttcnaagnggattaaganggaccnggacatacnggaacatnntgctattagagtcgacaagccggtgataatggnnaggaaccaaggcagcttctnatacccccaatcgtgaagagagtcccaanaaagcagtttaacccccgagtcctggctgaaacaaanctccaattancccgtggggttctcccaaggggggngatttttnaaggngtgccaannccaanatccttactcccattttaccanctttttngaaggaggntcatttttacagcctccaaaaanaggggaccctctccgacttgatggcctaggcatcctccttttt

SEQ ID NO: 3336 - DNA, 217 bp, Homo sapiens
  misc_feature (1)...(217): n = A,T,C or G
ttgaatttcatacttagttactgtatgactttaataacaccagctaatttcagtacttatggtttttagctggtttccttattttgtatattttttatttgtaaatattaaaaataactctagtttcatttgttcattcagaaganaaaataattttgattgctgaatgtatctgaagtaatccctgcattaaaatcattttctatcaaaaaaaaaa

SEQ ID NO: 3337 - DNA, 215 bp, Homo sapiens
  misc_feature (1)...(215): n = A,T,C or G
atcatcccttcaattggggcccaaggataaaagaacaagagaaagccagataagatgatctctactctctgnnngggnggtctactgaagtctgaaggatcccgggcacgggttcctgctgccatgtgctccaccatgccttgtgctgagatggattgtaccctcttaaatcacaaactgtaataaacttcttcctttaagtggctaaaaaaaaa

SEQ ID NO: 3338 - DNA, 354 bp, Homo sapiens
  misc_feature (1)...(354): n = A,T,C or G
gactgagggggccccctgatggaaaagcacnaagaagcatgagtctctcgtccccatgttcctcacagaactgattctgacagggnaanngctactcttcgagccttctttggaagactttctggatggcatttctggggcaattaatcactttgaaaacacggngttgtcagttcctaatctggtgcctgactcgtactttgacgctttcaccagcccgttcattaacaagaaggttgagggggngacctgcgggcccgggcccaacctgtcagccgtgtttgaggatgacaggaactttctcaccatcatcatgcaaataaaggtagagtcacttttactagaaaaaaaaaa

SEQ ID NO: 3339 - DNA, 220 bp, Homo sapiens
  misc_feature (1)...(220): n = A,T,C or G
caatgaaatcctcggtntactnagtgagggtcatcncaccgcatctggtaaagggatnatccnccagcatcattggnactatcctcanntcatgtggaatccgaattactgccatcanaattcacccctatatgaacntntnagtcttctatcctcccnctgtcangnagnaagcgncggtantcttttttgnaatctgttccntcgatctcgaaatccg

SEQ ID NO: 3340 - DNA, 455 bp, Homo sapiens
aagacagaatcgaaattgaaagaagaaaacacatggaccaggttgtggtactgtgcccgaagcgccaggatatcttgctgcgtcttggccagcctgacctgggaggcccggaaatccaccttctgctgcttctcggcctcctgcttcgtgcggaggaggctgttctccgaaaacttgaacacctggtgcagatggttcttcagctcctggatcacaaagttctccttctccacctaggccaggacgaatgaggacagggccctatttaatagccacgcagtcctcccactcccagtcacaggacagctggcctttggttgtgcccctcccctaggggcttatgcgtctctccggcctgggaccacatgctcccctcccctaggaaaggggttggccaaggcctacagggcaaatccagccagccatagctgtcaataaagtattattgggacaca

SEQ ID NO: 3341 - DNA, 223 bp, Homo sapiens
  misc_feature (1)...(223): n = A,T,C or G
gttgcaaagcccagaagaaagaaatggacagcggaagaagtggttgtttttttttccccttcattaattttctagtttttagtaatccanaaaatttgattttgttctaaagttcattatgcaaagatgtcaccaacagacttctgactgcatggngaactttcatatgatacataggattacacttgtacctgttaaaaataaaagtttgacttgcatacac

SEQ ID NO: 3342 - DNA, 169 bp, Homo sapiens
  misc_feature (1)...(169): n = A,T,C or G
ccgaccctcgccctgtgatgnggcctgnccatcctcaggactaaccgngtggaggtacccattgagtgccnataccccaggcaggncaangcgagcanncaccctatccancccacctgggttnccttcagagccnntgagcantcacgaggataaactggctttctct

SEQ ID NO: 3343 - DNA, 267 bp, Homo sapiens
actgagttaaatgagctagttgtgggagacaccagcgggaaactgtccgtgtataagaatgacgacagccggccatggcttacctgcttcccaaacatgactgcctgtcggaaactagatgctcacagtttgtcttacatgatggtgcaccagtgtactcccagttcttgagagaaagatcatgagtccaaagccagccaaggctccatagcaagtttgagaccagcgtgggtcacatttggagatctgatctcaaataaaacaaaa

SEQ ID NO: 3344 - DNA, 214 bp, Homo sapiens
  misc_feature (1)...(214): n = A,T,C or G
gatttgcctgctctatgcaccactgtgngcctggngcctgnggaggctggaggacggcatgngtcctctggcactgtgacagctgtgagctacagtgccgtgctgggattgaacctcagtcctttagaagagcagccagtgctattgaccactgaactatctctctagccctcttaaaataaatttcttcatgatttatccgtaaaaaaaaaaa

SEQ ID NO: 3345 - DNA, 271 bp, Homo sapiens
  misc_feature (1)...(271): n = A,T,C or G
gcctaacagtgtcagatgcccagcngaangcacaaacctttgnggnnggtgctatcactgantaacnatgccaccatatggaaacgcctccagcccttgnggaccaagaaagggcaggaaactgnngancctttcagctggacccctgctgcccgtcctgcatgtgcccattaaactgctctttggctgtgagcttgaggctgtcctacaagatcacctgtataacccanncttcanatgcatctgcctgatgaggccacagcctctggga

SEQ ID NO: 3346 - DNA, 460 bp, Homo sapiens
  misc_feature (1)...(460): n = A,T,C or G
ctccttggctccagagatggccnaacaaacggagcctgcggtgattactccagccatgctggaggaggaggaacanctcgaggctgcgggactnnaataacaaccgagtgnttntggagatccattccctcatggngcaccantgtttccacagngaatattttgacagnctgctgcatgcttgcaaaccgngtcacttgcgatgttccaaccctcctgcaacctgtcagccttactgtgatccaagcgtgaccagttcagtgaaagggacgtacacggngctctggatcttcttggggctgaccttggtcctntttttggcacttttcacaatctcattttttgtgaggaaanangaacccccgaaggcccttgaagggacaaagccttaaaagccccaaggtcaagctttgacgggatcggnttcagcttggacaaggccgacacccgagcttgacta

SEQ ID NO: 3347 - DNA, 298 bp, Homo sapiens
  misc_feature (1)...(298): n = A,T,C or G
tctttccaacgagcgntccccatacaatgacaanacattcctcaacctcatggaccttttaaataaaaatntttannanngtgaacanntatataananncnnatgtacaacctatngcccncgatcntgaagtacatacctggnaagcatanagaattctcaaaaaggcttggtggtgttaaaaacttcatcctagaaaaagtgaaggagcaccaggagtccctggacngggggggnncctcgggattacatcgactgtttnctcagcaagatccgaggaggtataggacttggggg

SEQ ID NO: 3348 - DNA, 102 bp, Homo sapiens
  misc_feature (1)...(102): n = A,T,C or G
ggcaagtctcgaaattcgatatcaagctgatccggaacccttaatataacttcgtataatgtatgctatacgaagttattaggnccctcgacaaaaaaaaaa

SEQ ID NO: 3349 - DNA, 200 bp, Homo sapiens
aaccattcctggaagaatgaagatgtctttgaagctatgggccccgtcctcttccagtctagctgcctctatgctgcaaatgccaggaatcttgagagctgccaatgttcagtcatcttcaccctggcctcctttctaagtctgtccccagggtggaaatgtggagatctgccttagctttgatgctgaagaaaaaaaaa

SEQ ID NO: 3350 - DNA, 663 bp, Homo sapiens
  misc_feature (1)...(663): n = A,T,C or G
gatattgtgaaactatctggttaaagtaaaacagaatagaagaaccagagtcactgtctcacttcccaggaagagtccagctgctgaccgtatccacccccaccctactcaggcgccttccttcctctccttctcaaaccgtgcttctagactccagccgctacatctcccttctgcgaagctcagaaagatgccacacatccccctggctcttaccaactgccttcctttataagaaccctggctctcagcactgagcagcatccgtccgtctgtccgtccgttcttcagccttcacaggtggtcttctctcggctccattccagcaggacaggtcctcctcagaaagcaacgctggctcacggaggccacagctgcctgtgctaagtcctccctatgccagttccagccaagctccagctgtctagcacctctgcatccaaagttccactgtnctatcttcctcttgcttttaacatctacaccaattaggtcttcctgtcttgcacaacccttcactgacaactcggggactacaatcaccactacacactggaagtntgatattntcttctctccattngttacctacttcaacagaccngaatgncttnttgggagccagggatccaaccagagacttggantctccatatcccctgg

SEQ ID NO: 3351 - DNA, 418 bp, Homo sapiens
  misc_feature (1)...(418): n = A,T,C or G
agggtatatgagaaatcgttacttctatctggccttcatcagctgacttttgaaaatcctcatgagatgtgtttccttaatgcggttctatttggcatctgtcttaattccttaatttcaactgcccacccactcaaccaagctgttgtgggtggccagtttctctccatcattagtgatgtgtagtctctcagagactgattactgactcctgtttaacctctactgccagaaaaatgttaccttatcttttcttaatttgccttgccttttattaaatgaataagtagagaaatgttagtaaaatggtaaaagggaatcacgtgacattcagggtaggaagagcttggatgctgnaaaatggatggctctctaactttttttttttcngactgattnttacagcaggtttaggtat

SEQ ID NO: 3352 - DNA, 443 bp, Homo sapiens
  misc_feature (1)...(443): n = A,T,C or G
actgaggacagctcgggaaccacgtggtctaagcccgtggtgcagttcactatcacggacaacagagggcgctttacccttaggaaggcagagccagttcctgtaccccagtagcccttacagagaccgcacaggaggcctggatggagtcttccattgggaactgcaggggaaaccatgccctggctgcggaaggctccggctgatgctggacagagagaaggagtatctttgctgagacaagccatgctccttcctgctgatgatccagtcaccgggggtggttggaagatgctgtccttggcctgagcagcccacaacctcatctgttcccccagacattcagggatccacttaccaatatgactttcccaatgtngaacatgcntacanggcancaanctttnaggnttacggctcctgganaatggggttatcctgaa

SEQ ID NO: 3353 - DNA, 519 bp, Homo sapiens
  misc_feature (1)...(519): n = A,T,C or G
gagccacacccagcacagggccaagcncaaacacaacatcacatgaacgaggacagtgagtcacttgggatatggagagacgcaagaggatcataagtttgaggccaccctcaggaacacagcaagtctgagggcagcccgagccacacacgcttcttaccaagaaaggatgaagccaatgttcccactctatcctaaaataggctgccaagcacacccaagaatgtgtcctgtgaccccacactagaagaccttgacactcagtatgatcgcatcacgaagcctgatctatacccaagggtgggaaccgcatcactgtggtctctacccatcatggagaccctctcactcactcactcgcccactcactcacagtgtgaccttgggaagccactgaactgatctagtctctctcccataaaatggactaatggttgcatctcccccgagagcttggcagaagggttaaaattaatatgtactgaatgctattgattatataaaggtattatatgtgaa

SEQ ID NO: 3354 - DNA, 117 bp, Homo sapiens
  misc_feature (1)...(117): n = A,T,C or G
ctgagaactttaaaggtggagagggaggagacagtagctaangatccaggactacaaagctggctattcatcattcctgacagagaaatttaaagaagagaaacaaacaaacaaaaa

SEQ ID NO: 3355 - DNA, 247 bp, Homo sapiens
  misc_feature (1)...(247): n = A,T,C or G
gctctgaaaaagacaccttaccacccacctcctactcctcaggcttatcaaagacagcccanctgagggcttngcttgntccctcacacctagaggggacngactgcnagatggagctgactcncttanctcgcaaggctcnanngcgcagtggnttgtcaaaccttccactttncnagaanggggaagaaagggatctgtgtgcggaaaataggaaacangctcttagnnaagggaaacttgcacc

SEQ ID NO: 3356 - DNA, 201 bp, Homo sapiens
  misc_feature (1)...(201): n = A,T,C or G
cacatcatcgtatctgtggctgntgggatctctctgagcacaatggaggggctgttacccccgaacacacgagtattgcgagtctctcccaatctaccctgcgttgtccaggagggggccatggtgatggcccggggccaccatgctgggaacgatgacgcagagctcctacagaacttgctggaaacctgtgggcagtgc

SEQ ID NO: 3357 - DNA, 309 bp, Homo sapiens
  misc_feature (1)...(309): n = A,T,C or G
gtgaaagaacgaggtgtctctgaatccacctgcccctcgccacatnaggaggggaatcccctcctgaaacantaccanggacccaccggggacttcantagccacattcccnaaaggaatctgtcatgtgaatatcagggagggacttttctacgccctggtgacttttnacgttgngaagcccggntctttgcnagctgngatgaaaatggacttgggattaatgggcctctaggggntgggacctgtttaacnacaccttcccanngaaatttttanaggggtccccctgnttttctcttttcctta

SEQ ID NO: 3358 - DNA, 201 bp, Homo sapiens
acactgagaagtgaagcccttccgggtcctatgccggtctccacggtttttttccgggtgatgaaggcgggtgccccggatgtaataccggcgaaagcatctttccttttcttccccgcctgaccctgggttcctagctggaggaaatccacagccaatcatgccaaagaggaaagtgggacttgatctctgaactctgga

SEQ ID NO: 3359 - DNA, 146 bp, Homo sapiens
actgagtggtgggatcagcaagttgatttctatactgctttcttacatcatttggcacaattaagtgccagaaatttattttgctgagatggacccagatttggaaaagcaagaagagagtgtacttggaaagatcaaaaaaaaaa

SEQ ID NO: 3360 - DNA, 111 bp, Homo sapiens
  misc_feature (1)...(111): n = A,T,C or G
tgccctagcttggttccctantttctcctccacagncanagttaggaagannngaaagaagctgttacacgaagtataaaccgcgggcgacaccacagcgaaaaaaaaaaa

SEQ ID NO: 3361 - DNA, 206 bp, Homo sapiens
  misc_feature (1)...(206): n = A,T,C or G
gggtttgggctgaagtanaccctgggcanangcnntanttacttattgcggaactctcnaggncggncaggaaaaantgnaaacaaantaaggccaggggngggcnccttgagaaacctcattttgggaaagtgaaatactttgnnaattaacatgcanntggttcaataaagacttttggaaagtgtcccccccaaaaaaaaaaa

SEQ ID NO: 3362 - DNA, 190 bp, Homo sapiens
  misc_feature (1)...(190): n = A,T,C or G
cataagacttccgtgnagctagaagccttcagagggatatctnctagatncgcnagccatnaggacagaccacaattggagattcgctaacgctcttgcgataaggactcccctgtgtatgacgnatgactanctgtttatgatgagatgcagnaaaagagggcagnaaacaaccccgggctgcttccgg

SEQ ID NO: 3363 - DNA, 292 bp, Homo sapiens
  misc_feature (1)...(292): n = A,T,C or G
cgccaggaccaccgcagtccanaagcctccgctgggggctgccatcttgcttccggggcaatgcgcangcgctcgcgaacgnggagngacacgcgcggnacacggtcagcgccgaacggtgacaacgtcgccccgcccgatttggctgccatggnggngcgggactcgacttggcacagtgatgcactacncntncctntgaatgactncttgctnaagcctgnatgnggacttcncatnngngctggaacnngnangaattgcatacncattgaacacacattccacacgt

SEQ ID NO: 3364 - DNA, 412 bp, Homo sapiens
  misc_feature (1)...(412): n = A,T,C or G
cttttttttcttaggggggtttccctngcctccgatcctgagtgantnttttcntgttgtctgtaagcnncnnaccgacgaagagactacgtggagacntncnagaantggnctgctggccanancnggcancattccattncgnaanaacaccaaccaggctcttttcggtttaccngaggannctnctatcacagacgagggtcgaccctgtnagtgtgaggcaaaagtngatncatccggggccngngcnggagcaaaggcctgacctcagaaggacctggccacgaaaatcattnataagccgcnngtcctccgcacacttatanaaagtgngacngggccatgtccgaataaccaggcttnnggcncaaaacttgagaaancccttctggctctcaaagctccgggg

SEQ ID NO: 3365 - DNA, 122 bp, Homo sapiens
  misc_feature (1)...(122): n = A,T,C or G
tgccggagagataccgacgaggaacgaagactgnttccattctcatccccatgnttagctgacacacttgagccctcacgngtgctgtaatgtcttattaaagaagatgttaaaacgaacaa

SEQ ID NO: 3366 - DNA, 527 bp, Homo sapiens
  misc_feature (1)...(527): n = A,T,C or G
ctaaaggaacatatantactatgganatgaccatncatgggnngcatacnttccttnanagggaggcgccngcaactgacatagccaagaggatgaagtcagaataccagaactgtgctgagtgtggaactctggtttgcctcagtgacatgagggcgcacataaggacctgtgagaagtacatcgataaatatggcccgctgctanaacttggcgacaccacagcaagatgtgtatgtccattttgtcagcgggaactggatgaagactgcttgctggatcattgcattatccaccacagatcagaaaggaggcccgtgttctgtccactttgccattcacgacctgatgaaagcccaagtaccttcaatggcagtttaattagacatttgcaagtcagtcacactttgttttatgatgatttcatagattttgatataattgaggaagccattattcgcagagtgctagaccgctcacttcttgaatatgtgaatcagtcaaacaccacataattttatgactag

SEQ ID NO: 3367 - DNA, 378 bp, Homo sapiens
  misc_feature (1)...(378): n = A,T,C or G
gtggggagcgtggcttcttctacacacccatgtcccgccgcgaagtggaggacccacaaggnagtggcntggaanctagaatcccnccaaggccacgcntncccntttgntgttcgagatcaaactgtntaagattnttcaaggtgnngttganntccctnacatncgaatgngctggnctanaccaaccncnctggtncctggaccttacanatcacnctgcctctnnttcctctgngctgnnaacaannnttgganncncccctggctcccncacccccaccccaccaatcttaaaagaattgtcttcaacctaatacttttaaaaacattttttaaaaaagaaacgttttaataaagctgttgggagataaatac

SEQ ID NO: 3368 - DNA, 374 bp, Homo sapiens
  misc_feature (1)...(374): n = A,T,C or G
tgaacctgcaagagccacacccngtgcaccnttctacnaggaccaatagattattcgcnagcgaataanactcccctcccccttncttcataactaatcgtcnccaccaanaaaattttgacccnttgatcaccacaaagatcnggnncanataagcctancncacagtgatcaaannntanancccataactaatcgtccacccantccttgacagttccaatgctgttnangaggaaggngaaatnnctccccaagcttgcatncccttntgcntnnnanctnnactaagganggataaccttattctcaacaatgncaggggcatttttggaatcaaccaaagccagggacatccctgttggacatttgat

SEQ ID NO: 3369 - DNA, 176 bp, Homo sapiens
  misc_feature (1)...(176): n = A,T,C or G
acacctctaccaaactcaaataannaaaccttcatcancttnactgnatttacaatgtcctgggatatgcaattntaatcacatccataanactttttccacaaattaattnaanatgnaatncccaccccaaatntntcttacatcatcccttcaattnacacccaaagataaaa

SEQ ID NO: 3370 - DNA, 471 bp, Homo sapiens
  misc_feature (1)...(471): n = A,T,C or G
ccggaagaaaaggactgacccatgtaagctgaaactggttggacccatnagtcacgaggggggggggnnttcggnctangaacacnatggagaaatactttaaggagtggagactggaagccggatactgatgctgtcacagacgtctgctgagttccgtacagcaggcggcgataatgaaatctaaattgatgtgaggtacngnccatgagaggnacagcctcangactgcgctcctccctcgctttgaacagtgatacacccaaggtgctgggtgccttcagaccccccagtgaccactgagaggagctcttcccagtccctttcactctgaatctcgtncccatgggttaacggtcatctgccggcaaccatggataccagacaccaagcattatctatgtagtaatgaaacaaaccttttatatnatatgtattcttaaataaaatttaatatagaacttaaaaaaa

SEQ ID NO: 3371 - DNA, 448 bp, Homo sapiens
  misc_feature (1)...(448): n = A,T,C or G
gctgataggcaaagctggcctcaaagctgtgaccctctttctccagcctctgatgctggggctacagatngggnctctccacattgtccagacattttcacagtcttgtttagcttcttcagtagctgagagtaagatttatgacattcaaaaccacagactttacaatactgctaagtcagatcaactatgaattggaatacaaaacaagagaatgttcccaaacccccaccatattctaaaacccagtcatctatcttgcagcattttttaatgacttctacaacatctcaaagttctttcaactattctccccataaccaagaagcatctcaaacttctttcaactattctctccataaccaagaagcatgcatgtattctgggaattcaaattcagtttcacagccacttctgagcggcagaaattatataactcctcagactc

SEQ ID NO: 3372 - DNA, 485 bp, Homo sapiens
  misc_feature (1)...(485): n = A,T,C or G
gaactgagagatcctgtntatttcgacgataattggctaaacagcaatcaaaactgaagtaggagacaattggaggttaaagatcagcaatttaaagaaaattttaaaaggcatcttggattacaatcatgagattttaggacagcagattaatgatttcacccttcctgacgtgaacctcattggggagcattcggatgcagcagagctcggaaggatgctgcagctcattctaggctgtgctgtgaactgtgagcagaagcaagagtacattcaagccattatgatgatggaggaatctgttcagcatgtcgtcatgacagccattcaagaggtatgttgattagagctttgcacttaacagcttgtaacaaattagtggagaaaactagttctcacaagagaaatggcaaccttaaaaaattattttattgtctatacctatatcctaattaagtttttaagttcactgtgaaaaaaaaaaa

SEQ ID NO: 3373 - DNA, 155 bp, Homo sapiens
  misc_feature (1)...(155): n = A,T,C or G
tttttggagatcgcctanccccttttttaggggttntgcccnnccccnaccanatatntggagtcnacgcccnaagattgatgagtttgccttgggagtcangagaaaaggtgaaataagaggccaccntgggtcaagaaggtcaaaaaaaaaaa

SEQ ID NO: 3374 - DNA, 368 bp, Homo sapiens
  misc_feature (1)...(368): n = A,T,C or G
aactgagcctcacaatgttgctctgactggctgaagcaacgtatgcgagaagctgggatctttcttaacccacaccagagacangtgctcgcaaagacatacctgaagtcattcaccaacaaaactgggaagcatgtaaaaacaaagcagttgcttgtttctaaataccagaatgcaattctttcaagcatctagatggagcccatgagctccaagcagagcagtaaatgacacaacctcggggttcgacgtgtgataaggtatcctgtaactactctttgtaccgctgggatctaccctgcttcactggatgacatgcagccttttctcttagcaaccgcatgaataaacatccaagagaaaaaaaa

SEQ ID NO: 3375 - DNA, 147 bp, Homo sapiens
  misc_feature (1)...(147): n = A,T,C or G
ctgagttggaacatctggaagcaacggttggcccanttcagagcaagcactanaatagganagaantaggaanggacnaanaaggaacctgatcncaattaaggaagctgctgtttctgtacaanaagantctgatcttgaaaaacc

SEQ ID NO: 3376 - DNA, 231 bp, Homo sapiens
  misc_feature (1)...(231): n = A,T,C or G
ggaatcgaacgcccgaagactctttnaggaatggatttcttagnatggccaacgtgganttganttccntggcccggcttcccagcttgaattnactcnggaagttggaacttctgactntatntttctggaggcttggaantcctggnacacaaatntcccaatcttngctacctcaatctgantggaaacnatatataanatctcatctncagtactaagcgctgcgta

SEQ ID NO: 3377 - DNA, 243 bp, Homo sapiens
  misc_feature (1)...(243): n = A,T,C or G
aaatggttaagcagcgctggcagagtggcggcggtcagaaggcttgccttcggaatgcanatctgttacggactaggganccaggcccttgagcttgctcttggaactccatctcttcttccttccctcggcttacccaggctgttttgatntttcagtgcantgttgaatgtctcattgttttgctgtcctgctatttaacacaatgtgttttttttttttatttttataactaaaaaaaaa

SEQ ID NO: 3378 - DNA, 205 bp, Homo sapiens
  misc_feature (1)...(205): n = A,T,C or G
cattgacaccacttctaaatttggccacnnattttttcagacagcacangagaaaagggccttcctgggtccccannaggaancatctggagaaagaaaatccggagaccttgggaaacatgtnanatntctggaatgnacacacctgggatntancactcttgctatctgtccggtcctttttgttcaataaagtcctaaggca

SEQ ID NO: 3379 - DNA, 499 bp, Homo sapiens
  misc_feature (1)...(499): n = A,T,C or G
tgaactggtggcagaaaactgaaggaggatacaggaagatgggaaggaactactgagctgcaccatgctggccgtcctgtcccctgtgctgaaggacacctgcatcacacctgcacagggaggggacagcagcctgaacttanccctgatgctgggctgtgtgaagtggctaatatgcagcaggcacaccaaggtctacctctgtgggaaaagtggctgaggctctctctcantacctctttccctggtgcctctcactcggaccctcccagggccgcacacaccctccagctgtttcatcactttgctcaggaacctcagctgcctttgaacgttatccctaaaaatcaccanctttccacatgacattcacagntaggtgccagtcacttctaaccccagggaccctattntggggggntngcttantgtctntggccagnnatgnccatngntgggaaccatgctgaaggnnagnggggggtgggggaattagggc

SEQ ID NO: 3380 - DNA, 259 bp, Homo sapiens
  misc_feature (1)...(259): n = A,T,C or G
tggccatgagccattttgagcccagtgantacgncccatgtgaactgctatcagantnatcntngccnntgtccntaaacngtagggttgtggggagnctaangtgacaactgatcctgcttccctttcnggaagccanggtccctgcagaagaaaatcttgtgttggatctnctgtcccatatccgcgngagtaacattagnanaagnacngggacngtgtcccatgcctgcggtcctaacacttgagaggtggagga

SEQ ID NO: 3381 - DNA, 301 bp, Homo sapiens
  misc_feature (1)...(301): n = A,T,C or G
cctgggatagggtattgactctgtaanaaaggcactaatggttacttccacttccggtgtcgctctgtcttccactcataggtaaagggcctagtataagccggnaagnatccagggcacatcggtgggtatgctgtacagtgtgtggggtactgcccaccctttccacgtaagnagtaaacacaccaaagaacttctggtggtgttccggctcggctgcttcttgntgcttcagcggacttgtgcgattggacagagcctcttggtttcttctggatcgagccactgctgctgagtttgt

SEQ ID NO: 3382 - DNA, 229 bp, Homo sapiens
  misc_feature (1)...(229): n = A,T,C or G
tatcattaccggatccatctatttgaatactacagcttccttaaaaattgcanaaaggggtctggananatnactcggcccccaagcactggctactcttctaaaggacccaggttcgatacccattactcacntggaanctcacatttntctgttactccgttctaaatctgaattcctctctgacctctttgggcactgcacacacntggacaaaacacctaaatgc

SEQ ID NO: 3383 - DNA, 149 bp, Homo sapiens
  misc_feature (1)...(149): n = A,T,C or G
ctggaagacaaccgggattggtatgacaatcgccatccgccagagatcctccccacccctgaanccagtgaccttatnacatgcatcacagatccgngccctgactgacaagttccaatttgagctcaccttgtaggaagaggattgaa

SEQ ID NO: 3384 - DNA, 114 bp, Homo sapiens
gaactgaggttgctattaaaatcatagataagagccagctggatgaagaaaacttgaagaagattttccgggaggttcagataatgaagatgctttgccatccacacatcatca

SEQ ID NO: 3385 - DNA, 223 bp, Homo sapiens
  misc_feature (1)...(223): n = A,T,C or G
ggcaatcctttccttnactcggaagtgaagatactcgtntttgatgcctncttggtcccctccggctaccatgctttgntntcagaataagancgacgacccanaatnctnctttcccttttgaatttactaaagtgnatttttctatgaaaagaacnttgaaagacaanaangaaacggannggtacnantcgctacgaanatcttaagccatgaatgagtg

SEQ ID NO: 3386 - DNA, 178 bp, Homo sapiens
  misc_feature (1)...(178): n = A,T,C or G
actgaggcaggagganggcgagntncaggccagacaaggctacatagcaggaccttgcctcaacaaaagtgaaaaccacatttctgaagcccttgaagctgagcgtccctcatcctgtaaagtattcccagtcaggcaccgctgctgtcaatcaagaattgaaactgaaaaaaaaaaa

SEQ ID NO: 3387 - DNA, 319 bp, Homo sapiens
agcagtaaatcaagctggtgttgtgtgcgaagagaaagtaccacttgatcaagctgtctataaatacagtgtgtcatgactccaagtagagaaggagaagcccatggaagccaatctgcaatttggtgaactctcttagaaacacagttctttcaggcagccgaaggattatctaattacccaaacaacagagacttctctctggtccctgaaggaaactcattgggttaaaggtggtcggtcattggcctctctggtcttttgggaacaaaattgtttgggaaataaagttgagttgatgtcattttaaaaaaaaaaa

SEQ ID NO: 3388 - DNA, 146 bp, Homo sapiens
gatgaaggaagaaatttacggaaaggaagaaatggcggccacattcacactgttaagctgaaggaaagatactaactcagtatctcagtctgccttgagctcccgcgtggctcacagttcaagaacataaaggcaaaattctaaaa

SEQ ID NO: 3389 - DNA, 195 bp, Homo sapiens
tgacgggaagccccagcatcaagtgtctgccgccacttctgctgcctgctgcctgctgccatgcttccccgccaggatagactctgacctgcaggaattatcagccccaaaacaaaccttttcttctataagtcaccttgttcatgtgtttatgacaatgccggaaaggtaataaatacctcagaaaaaacaaaa

SEQ ID NO: 3390 - DNA, 319 bp, Homo sapiens
gattttgcagttgaaggtgatgaggttggaacacctggtacatgctgaaggaccagcggatctgggagctgatgagaactggacccgaggagcatcagagctggaggaggccccacccagagtcactcagacctcgatcctgagcccaaccggagctcctcactggtcatgcagcctccatgtgagacgtgaggtgtggaggccagagcacgctggggccgcagacgagtttggacagatttgagtttggttctcccaaccccccaatatcgtgtcatcatcattgatttactgcatttgtgagctcacaaaaaaaaaa

SEQ ID NO: 3391 - DNA, 184 bp, Homo sapiens
  misc_feature (1)...(184): n = A,T,C or G
gcatcctgacactgaagaacaacctgctggtccagatcaaaagtcaatatatgacaataaaactacaggaacaagggctggagagtagcccagccttcaatcccagcacttgggaggagggnaagttgatctgngagntcaaagccaaccnggtcttnataggggccgaactacccccaaatta

SEQ ID NO: 3392 - DNA, 386 bp, Homo sapiens
agctgctgcagtggctagagcagagacatctcctgcacgcgctggtggccgacgtggacccagcgctagacccgcagcttcctcggcaggcttctcagcgccagcgccgcagtgccgccaccaacgctgtgcaccgctgctgtcttactggctgcacccagcaagacctgttgggtctgtgtccccactgaaggagcacagggctcaggcggtgcgtccttaattgctccccacctcctggctatgtcattgcaacaacccagtttgccttggaggatccctagtttattcatagatcgcagtaagcaaggaccacaggccctgtccccaagaagccccatcatgacctgtgcccacctcctccctgtgtcccaaacagtctaaat

SEQ ID NO: 3393 - DNA, 148 bp, Homo sapiens
  misc_feature (1)...(148): n = A,T,C or G
tcagggggcacagagactcaaccagtacnaaagaatncanaggtgatggncntgtntccctcnagagaagatgactacattataaactcccttttcaaccccaacacccactatatatttttaatatatagaaaaaaaagctaaaaaa

SEQ ID NO: 3394 - DNA, 300 bp, Homo sapiens
gacctgaaaagcttcctttcttcaggcgccagaggatcaagagaatgcagcatcccaagcctcctcctgctggtgctctgcctcctcctgcagggtgtggctggtaagggctgaggctcctaagtgcgatgatagactctcctcctgagctgtcacccttgattacaccacagtgtgccagcaagaaagctgggtggtgggcatctgacttggtgttgtgtcctgtaaataacagattcactggaatatgctggattctcatgctgtacaataaagaggcttaatggtgaaaaaaaaaaa

SEQ ID NO: 3395 - DNA, 269 bp, Homo sapiens
  misc_feature (1)...(269): n = A,T,C or G
tgtatagccctcgctgttnaggaactcactttgtantctcagcactanttagcagaagggaccaggaggaacacaagcagaagttctcagctgtacctctcatgaggaagtgaagatcagcgaagagtggatactaacaagcattgctcagccggctatcccagcaagcaagctcagcctctgttattgtctgttgagtcctttgagttttttggtgtatttctctctatggagtcctgacaaatgtagcccaactacaaaatataagg

SEQ ID NO: 3396 - DNA, 312 bp, Homo sapiens
  misc_feature (1)...(312): n = A,T,C or G
cccttgctcaggatgnttgaccgcagcatcaggagagtaaaggacagcanggaaagtgactaatcctgcacagaacccaggacccagatctcccgggctcagcatctcttcctgtcagttctgaacggnctcagtcaagagcagaactctaggcagtgtcccatggaagaatccatcacatttcagccaaagcatcgagatttgtcttctttttctatcaagctttcctcaggtatttctgtgtgggcaattaatttctttaccatccttcaataaatatctaacaataaagatgatcaaaaagtgaaagta

SEQ ID NO: 3397 - DNA, 362 bp, Homo sapiens
  misc_feature (1)...(362): n = A,T,C or G
gcccttgctcagtgcttgnctgagtgcaccnaaaatgtgncgtggngacgcatnagggtgccttgctntntnnccttnaaanctacacaccgactttggatgnnncttctgagacatcntcgtgaggacacctgagtnttgnctccttntggttntgnnaatggtcattgaacntantgctggncantgacaagcatgcagcnctgatcctctgtggactcatngntattggcagnctgacaggatgtggaatcacccatgagacacattatcaggtgtgcctgtgaaacacgtnncccaagagattacctgtgacaggaattcccagctggaatggtgggtggcacccgttggccctggga

SEQ ID NO: 3398 - DNA, 314 bp, Homo sapiens
  misc_feature (1)...(314): n = A,T,C or G
gccagagcctgggccagaggcctgcaaagccctgtgtggtggaaccggaggtacttcatttaagaggacgcctgtccaggacccgntgttcanatgtcctttgccataatgttaaccttggaacagccttgcctgtggagaagccggcttgaccatgatgccaagttccagatctttttgtgccaggacaggtggggagggggttttaccagtgttcttaactatactgtgatttttattattgccatgtccagcttttaagtggggttttaacggttttataataaataaaagtttcaggcagaaaaaaaaaa

SEQ ID NO: 3399 - DNA, 226 bp, Homo sapiens
acggcagacctctggctcctggccacaactcatcccagactcaaagcaggaggggacctctagctcccccaaaccatctctactcaccccaggacttccctccccagcaacctttgccttgtccactcctaataccagtttgcttccaacacgttccccagagctttcaggcagcccaacacccacctcccctgaagggctaacctctgcctcctctatgctatca

SEQ ID NO: 3400 - DNA, 209 bp, Homo sapiens
gaggtccaacagaacacgagagagaatactgcatgtgtacatcactggaacaagaatctgttcgggtttccctgggaatccagagtgatcagcctccgaagaaccaatgctatgcaacaggcagttcacagtcgagtgaacatcaatgtggaatgagtggaggcatttcaatgcaaataaatgctgaatatgaaggattaaaaaaaaaa

SEQ ID NO: 3401 - DNA, 365 bp, Homo sapiens
  misc_feature (1)...(365): n = A,T,C or G
gggagactcgggcggccccttgatctgcaatggcattcttcatggagtggactccttcgtgatccgcgaatgcgcctccctccagttccctgatttcttcgcccgggtgtccatgtatgtggactggattcaaaacgtgctgcggggcgcanagccctgaggtgcccttctgcgctccaggcagcctaaagctggggcgaccagcaggctctagtgggaaaaaaatggagtggggtggactagacctttccaggcttttctttcacccacgcacccacccacgcagcaccccctggagtggagtcagctctgttccctattccatatgacctcaataaaaactgagacatatttaaaaaaaaaaa

SEQ ID NO: 3402 - DNA, 237 bp, Homo sapiens
  misc_feature (1)...(237): n = A,T,C or G
aggaacctgtcttattgngaccactgaatgntacggccnnaattgggccccgantcncntcgattatggactgcnttcagnaatacantgctttggaccttcctngtgatattanaaaagtttgnnntgntcgnncnntacngatnanaaatacttgtacttccccttttgcttgtgcatttaagccttgagcctttctcaatacagcgggaccttcttgccactcaaaaaaaaaaa

SEQ ID NO: 3403 - DNA, 152 bp, Homo sapiens
gccaggcctgccaacctgagttcaatagcagaacccacacagtagcaaaagaaccaactctgacctcccctctccccctcccctctccttcccctctccagtagtcactccagagacacccaaaataaaaaatttaaatgtaaaaaaaaaaa

SEQ ID NO: 3404 - DNA, 364 bp, Homo sapiens
  misc_feature (1)...(364): n = A,T,C or G
gcaagctcctggagagccagcccccgcccctgcccccgccccatctcaccccagtactccctctctcttctctactatggacagagaatacactgaggagcctgctacacacccagctgatctggggaccagcggagccatgaggctgggttcagcaattctcggtttactcctgctccaaggctacagctctcaacctacgacaactcagacctcgcaggaaattctacagaagtcttctcaggtctccttggnatccaatcancctgtgacaccaaggncaagcaccatggataaacagtccctttccttgcctgacttgatgtccttccagccacagaagcacacactgggacctggcaca

SEQ ID NO: 3405 - DNA, 350 bp, Homo sapiens
  misc_feature (1)...(350): n = A,T,C or G
gacgctggtgactgttttgggctgggcactgtcgtcgaaggtatgttcagctatgacagcccaaggacagctactgaggacatttgcctgcttttgaagctgcacaccgtttctgaattctccgcagcgctgaggcttatctccgggcgccacaccgtcttatctgaagttttcttcctttcgtcttcctgagaagatttataacccagaaaagccacgccatgatttctgcttccaaaattgtattctggttgttttattttgctccctgtcctccgttggcttcgaggatgctgttgagcaatctacaaattcccagagtgtctgngactttgtaggcaccggggccg

SEQ ID NO: 3406 - DNA, 127 bp, Homo sapiens
gatgccctctcttaggtttagaaatcgctggaataccaaagagcaaccgcttcctctggtgggcagctgattcttatctgtacatgggacagggcgggggggcaggggggggggagttaataataga

SEQ ID NO: 3407 - DNA, 193 bp, Homo sapiens
  misc_feature (1)...(193): n = A,T,C or G
acctgggtaatgaccactgactggctcttcctaaggggcctgtacttaaantcccaacngccacatgtatggggtcacaaccacctgngaataagcatctgcacgccctnttctggtgcatctgtaaggacagctacagatgntacttatttataataataaataaatctttttttttttttaaaaaaaaaaa

SEQ ID NO: 3408 - DNA, 185 bp, Homo sapiens
ggtcctctgctgttttggtgtgacattctctctcgagtctgacaagctggactggcctctgtgtttgcttccctgtctccacagtatgcgatccaggacctggaagtatcacaaacgagaaccaatcatcctgtttacattttggactgtaaataaaggaattttttttaatgcaaaaaaaaaaa

SEQ ID NO: 3409 - DNA, 186 bp, Homo sapiens
gctctgctcataactgtaggcaagaacgtggtgcctcttcactccagaatggggctggtgaaaggcatttttcttctccaaaactcatttctcaagtcaaactataatgagacagcaagctgtcaccagcagaagagactatgtatgacctctattaacaaaggtgaattaactgaaaaaaaaaaa

SEQ ID NO: 3410 - DNA, 220 bp, Homo sapiens
gcaaatctgcaggagacacagcgtgacggctggactggaggtggcctttcctgaagacggcacaggcagatagtgacacaaacggtcacccttgacccacccacagaagctaacatcagcctggctgtgctgtgtgccttcaggaagagcacttgacagtgcttaaaactcccgccaatccactgttgcataaataaaagtggggccaaacagaaaaaaa

SEQ ID NO: 3411 - DNA, 445 bp, Homo sapiens
agtgtttaaaacggaccaacaacttgaacaatgccaagtctcaaggacaaaaggatgctttaccaaatgaagaggggacagaactccagcccattgtgagatagggaccaagagaactttgactacctgtgacaccgagacaaagtctacagctgttttcacgtgaactagagcacggaagatgttaaaactatgtctatatgcatcaatttaaaaggcacaatattggctgggcacagggacacacatctgtaattcaaaactggaagaggctataaggctagcctgagctacatactcagatgttaaatgctagcctgaatgctacatagagacctcatataaacaaacaaacaaataaggttggctcactggataaaggtgccagttgccaacccgaggaactgaataccccaggacccacatggtaaaaggagagaatcag

SEQ ID NO: 3412 - DNA, 382 bp, Homo sapiens
  misc_feature (1)...(382): n = A,T,C or G
actacaaagcaattggcaacgatacggagaggggacgttttctgaagttatgaagatgcagagtctgagagatgggaattactatgcgtgcaaacaaatgaagcagcactttgaaagnattgtgctggaaaaagtaggggttgaggccaaacagccaaattctgccatcaggaagtgcgtcagggtgcanctcattaagaacgggaagaagatcacagcgttcgtgcccaatgatggctgcctgaacttcattgaggaaaatgatgaagttctggttgctggatttggtcgaaaaggtcatgctgtangtgatattcctggagtccngctttaaggtggttaaagtagcccatgtntctctgttggctctatacaaatgggt

SEQ ID NO: 3413 - DNA, 541 bp, Homo sapiens
gcaggtgacaacgctgaattggtcctcaggagcggatgttcaaggaaccctgcctatgcaccatgctagctgccagtcctaggttgggacattccactggggacatccatgggagagctatggccattaacaagtcctgagccctgacctgaagccatcagtggcctagctgctctacctgactttgtggcctcccttcctggatctctcgcttacgacaaccgacaacaaagatgtttgactccagaagatgctccccgcggcccacctgagaggactgtccacaccccaccccactgcgccctgtgccatctacctctgagtccccaacttctcacccatgtttcaactcccaccccagagccttgtattccagatctgagcagcccttgcttaggaacctgaggtggggggtgggtaggcagacccaggggactgagcagggaggggaaggaggggtttctgctcttggctttcaaagttctcaatgtgtgtagccctttgaataataaacatatgtcatataatgtaaaaaaaaaaa

SEQ ID NO: 3414 - DNA, 390 bp, Homo sapiens
  misc_feature (1)...(390): n = A,T,C or G
gtggatctaccttaacgatcagaacctatgcatccctgccagctcctcctttgtctacggagcggtccccataggagccagtatttatgttatcggagacctggacacaggtaccaactacgactacgtgcgggagtttaagagaagcacgggcacctggcaccacacaaagccactcctgccatctgaccttcggcgcacaggctgtgcagccctgcgcatagccaactgcaagctcttccgcctgcagctgcaacaaggcttgttccgcatccgggtccattccccttgaagaggaagangagccaaaagtgagatcctgcccaagcgcatcccgtggctggcggcggcaagtgcagtgaagcagccccatctcgctgtgcgctgggc

SEQ ID NO: 3415 - DNA, 106 bp, Homo sapiens
  misc_feature (1)...(106): n = A,T,C or G
gccgcctcttcaccacatgagnnttaaacataaataccctaccgattcncaactgcacctgtngtgcaagtgtgcagcccttanntcgctggttctacttcctttt

SEQ ID NO: 3416 - DNA, 137 bp, Homo sapiens
  misc_feature (1)...(137): n = A,T,C or G
gtacgccacaggggcatttcaaagctcacaanattcttggncacgcatntatgcctgtntnccnntaaacctcgtncagcagaactggagagntnttcagtgccaagaactttcangtntttactttgaccctgaaa

SEQ ID NO: 3417 - DNA, 385 bp, Homo sapiens
  misc_feature (1)...(385): n = A,T,C or G
tgagaagggaggcggangtctgacaagatgtaccaggtcccactgacattggaccgggatgggaccctagtccggctccgcttcactatggtggccctgatcactgtctgctgtccacttgtcgccttcttcttctgcatcctgtggnccctgctctttcacttcaaggagacaacatctacacactgtggggtanggcntgnanggcactgncggatcatcntgacagangagncancnctcatggnctactgggngggggcgggctattngtaaancnagggctcangannnangtnccttttaccttctatgananatatanggcctgngnntactaaagctgggcaaaccccnanactnagaaccttggccagctataaaa

SEQ ID NO: 3418 - DNA, 251 bp, Homo sapiens
agactgagagcaccgaagtaccatttcacttccagactgtacctcgttactcgacaggatggaaatcacaacttcatccactggggctggaaagcaggccaagggattacccccgagcagagagggggagagaagcaagtaagaggtgcacagcccgcaatccccgtacttgggagatgcatgcagaaggagctcatgttccaagccaggatacgacacagagatcgtgagatgccaggacttggaaggtg

SEQ ID NO: 3419 - DNA, 445 bp, Homo sapiens
  misc_feature (1)...(445): n = A,T,C or G
tggctcctacctcatcactggctggtttacctttatcctgnctatggatgcctgctacagtatccacgtctacgggatgataaatgaaacctactgcaagacagaagggtatatgaaaagtcccctatcactactatgaacaagggaaagatgagtgtaacgaatatcttctccatgaacatgccccgtatgggggacacaggttcatcaccgagaagaaagtgtttgccaagtgggccaagaagcacagaatagtattcacacacccgaactggacgctgtcctgatgccgtganatnccacnantntgnnggnggntgtggngaaaaaangctgatggtgctgaccggtgtagcangatgntcaaggggtgaccatggccctggacattctntggnggnggatctgactctgttagnanttgaacttggcgttccttgggaat

SEQ ID NO: 3420 - DNA, 310 bp, Homo sapiens
gactgaggggaaaccgcccctcatgactcaacagcagatgtctgctctttcccgggaagggatgctagacgccctcttcgctctctttgaagagtgcagccaacccgccctgatgaagatgaagcacgtgagcagctttgtccagaagtggagacccgccaactgtgatcataccatttccggaagggaggcccgcccaccacgattgtaccctttcctgtggggagacctgcccactatggttgcgtcacttcctggcctaggatcctggaccaataaaaaggagaaaattcactgttaaaaaaaaaaa

SEQ ID NO: 3421 - DNA, 422 bp, Homo sapiens
  misc_feature (1)...(422): n = A,T,C or G
agaggagatctaaccttnactntgaaactgtggctttttgcctgcctggntgcctgttttgttggggcctggatgccgggtgtncatgcccaangcgcctttgaaaactgctgcctgggttaccaccacangatcaaatggaatgttctccggcatgctangaattatcaccagcaggaagtgagtggaagctgcaacctacgtgctgtgagattctacttccgccagaaagtantgtgtgggaatccagangacatgaatgtgaanagggcgataagaatnttgncagntangaaaaggctnnnncantggaaaanagncncanactttcagactganaggaaagaagtcnaaccatatgaaagtccaagggggagaaccccaacaagacangngtgaaggangcccccctaagttattcc

SEQ ID NO: 3422 - DNA, 278 bp, Homo sapiens
  misc_feature (1)...(278): n = A,T,C or G
agactgaggacccagntgatggtctgctgttgccccattcanaaatgtctgccatcctcaagttaaacctctctggcancaccctcccaggcatgcccagaggtgtcttctacctgactctagatccagtcaagatgccaatgtgggttaaccgtcatttcatggtgctgtgatggagccaggagatgacaattggagggaagcaattgttggtgccatgctcttgaacctccaaaatggttaaataaactcggggtttctttttttaaaaaaaaaaa

SEQ ID NO: 3423 - DNA, 128 bp, Homo sapiens
  misc_feature (1)...(128): n = A,T,C or G
tcacagactgagtttgacaggttnaaagcacnagaagaanaatactanccaangngccccagacgggatcgngactccantgacngccataagatnccctaaagctaaggcactgcagaaaaaaaaaa

SEQ ID NO: 3424 - DNA, 254 bp, Homo sapiens
  misc_feature (1)...(254): n = A,T,C or G
ggccaaatactacacaangggggactggggacaccgccccccctttacatcatgaaactgccgatgttactggctnatgcntgggngacaccagcatacaaagtcttgacaccaacacctcanagggctgtgttctgtccccgtgaccatcatctagtgcctggaaagactagtgacaagaacttgttgccaacttcctattacctccctaacagntgggcaataaaccccataggttaattcaaaaaaaaaaa

SEQ ID NO: 3425 - DNA, 109 bp, Homo sapiens
  misc_feature (1)...(109): n = A,T,C or G
cgaagtctcgatcactagacgggagatgctgncaagtgccccagacgggatcaagactccaatgacaaccataagattccctaangctaagacactgcaaaaaaaaaaa

SEQ ID NO: 3426 - DNA, 239 bp, Homo sapiens
  misc_feature (1)...(239): n = A,T,C or G
ggtttactgaccagtacttgaattgctctccctggctgggggtaacctctgcccctggagccttcccttgttcctacaatgccaacctctcangttagacccagccctggagctcatggggtgccttggccctgccctgcacacctgcttctctccatgcatccaggtctatcgacctgaagctgcaagctggcccaaaaaggacaataaaacctgccacttttgcatgaaaaaaaaaa

SEQ ID NO: 3427 - DNA, 366 bp, Homo sapiens
  misc_feature (1)...(366): n = A,T,C or G
cacggctgtggtgacccaacagctgntgtataacccatccgggagaccccgagggccaagccctgtcgtgttagcacctgcanatcgngaaggttcgcanaggcatnatggctcacagcttggaggacctcctgaacaagggccaggnngtctnaacaggaaagntcttgggnacccnatccctnnnntctggccacancccgcgggacaccactattgttnttgtgnaaaataataactgnatagctnttnntgaggccctnatnaatnatcatccaantgnantaccataggaaaggngatttgattgngaccanctatttgganacgccctatcangttttattaagttagaccatttgacct

SEQ ID NO: 3428 - DNA, 138 bp, Homo sapiens
aactgaggcattaaagacctcattttgctgagtggccggatattcctactgctggccctgcttaccttagtcatttccgtgaccacctcctggtttaactcactgaaaccttcgcaaggtcatctgaaagaaaaaaaa

SEQ ID NO: 3429 - DNA, 427 bp, Homo sapiens
  misc_feature (1)...(427): n = A,T,C or G
atagccctggaacggaaatcatgttgggcaagcgngaccaaccgctgaagcacggcaggaggaatgactatnataggatttaaggatggctcccgggaccgcagcatcagaggaacgtctagaacacaccttaagggagagaaagaccgttgtgagggctctcaggagcaagcacctatactctcttggcaactttcctcgatgtccagtgtccacncacctcctagctttgagcatcgntgnctactcgtccttgagagcgtcngcaagaaggaaattactctgccattttcaaccacccctnatcccaatcttaccatacttatcctagactggctcttccaggaccagatcttgaggctgacntaacctttngggtncccaaaattgagnnccgggtggnccaaaaagggggttcctacctata

SEQ ID NO: 3430 - DNA, 153 bp, Homo sapiens
  misc_feature (1)...(153): n = A,T,C or G
acgactgccattggtcatgcatacatggaccatacatggaccnncncatgcgtgtngntangaaanaatccttnatcacgngnnctttctactgtttgctttngcagaacatcctctctcttgtatctgcttcagctaaatgttccttcatga

SEQ ID NO: 3431 - DNA, 496 bp, Homo sapiens
  misc_feature (1)...(496): n = A,T,C or G
ctgaggttatggagacaaaggatatgctctacattgtcacagaatttgcaaaaaatggagaaatgtttgattatctgacttccaacgggcacttgagtgaaaacgaggctaggcagaagttctggcagattctgtcagccgtggagtactgccacaaccaccacatcgtccaccgggacctcaagacggagaacctgctcctggacagcaacatggatatcaagctagcagattttggatttgggaatttctacaagccaggcgagcctctgtccacgtggtgtgggagccccccgtatgcagcccctgaagtcttcgaggggaaggagtacgagggtccccagctggacgtctggaacctcggtgnggngcttgtacgtcctggtcttgnggctccctccccttcgacgggcccaacctgcctacgctgagacagcgggtactggagggccgcttccgcatccccttcttcatgtctcaagactgtgaaaatcat

SEQ ID NO: 3432 - DNA, 409 bp, Homo sapiens; identical to SEQ ID NO: 24
  misc_feature (1)...(409): n = A,T,C or G

SEQ ID NO: 3433 - DNA, 220 bp, Homo sapiens
  misc_feature (1)...(220): n = A,T,C or G
ggctggcctttctaagcagttaggagcnacgtcatgcattttttctaaatngggccngttttccagtgncancagcacagccttgctngtacaanaaaagcggntggttcctgcttcctggacactgcttgaagttccactnctgactttccttttgnngaaggaacannaattccgtgngaatgtngtaaagcttgaaataaacccttttttctccccc

SEQ ID NO: 3434 - DNA, 165 bp, Homo sapiens
  misc_feature (1)...(165): n = A,T,C or G
gaacggggagaaaatggtttcctggcttccctgtcagttcaagaacatccctgcctcagagcctttgaagntacaggatagctaanaactcttgtagtgaaccatggctgcttctgttnccttnagaactctgcttacatattaaagattctttggaccctttaa

SEQ ID NO: 3435 - DNA, 172 bp, Homo sapiens
actgaggtgaggaaaccgaggctgaacaaaggttattgttgagaaatcacacaggcagtgaatggtagaatggactgagactggagccccagtgttgactcagccattgacacgcaagcctgcttatactgtctcacttttacaaatcatgaataaaaataagaaatgaata

SEQ ID NO: 3436 - DNA, 146 bp, Homo sapiens
gggagagggagaggaagaaggtggtgctagtgggcgggtgggacatcagtggggaaccagtgaccaagcagttaactgttcctgaggctcaaacaggtcccaagtaaaaatttatacctgaataaaagatttcagaagaaagaaaa

SEQ ID NO: 3437 - DNA, 448 bp, Homo sapiens
  misc_feature (1)...(448): n = A,T,C or G
agcctgaggtgttcggctatgacangatgaagctggatgtctccttcccagacgctggctgccagcaactcctggagcatgaatgcaagctatgtactttccaggagaggcgaatgggcacacaagtagctgctgaccctctggtgaatagtcaaagggatacatggtccgaaccagcgatgggaacagcaaacaaggctttcccttggaaggtcccagcaaggtgtctggacccacggccaagtgcacctgctgttgtgaccaaggaaagctggagagaggcaggctgagtctgtctgcaggcacgttaccggatgccagtctgagtcctcaactcggttatcatgagccaaggagaaaaggagattcctggactgacagatactcctgggccccaaagaactgcangaatnggaaagcttttcagtctttccaaaagaaagctgat

SEQ ID NO: 3438 - DNA, 155 bp, Homo sapiens
  misc_feature (1)...(155): n = A,T,C or G
tgtgccatagaggatgctggtggtcatggtntccacccagaaagaagccctgctgttggtangttctgatggtggaagaggataggactgacctggggctgacatctgtctccccccagcttacattaaaggatatgcaacctgaaaaaaaaaaa

SEQ ID NO: 3439 - DNA, 126 bp, Homo sapiens
  misc_feature (1)...(126): n = A,T,C or G
ccgatgccaggatggcaagtncntctccccgcagtttgtgtgtgatgganaccgagattgcctagatggctctgatgaggcccactgccaggccaccacttgtggccccgcccactttcgctgcaa

SEQ ID NO: 3440 - DNA, 228 bp, Homo sapiens
  misc_feature (1)...(228): n = A,T,C or G
ggtgctggtgacattttgtgggagcgctggcttttacctggcttactacccaaatctgtccttgggaanaatgctcaagaagatccaatttcatcgctgcagtcagtgtacaggccacgggaaacacagtcctcttatccatacaaaaaagacctccctcttgctctattttgactactgctaacccccaaataaatacaatctggaaagtaaatgcaaaaaaaaaaa

SEQ ID NO: 3441 - DNA, 111 bp, Homo sapiens
  misc_feature (1)...(111): n = A,T,C or G
gcaggctggttgcagggctccaaggatgaatngnngggaatggactttccccccttttttcccccctnttttctaaagcgtgtctgccattaaaaatttgaaccttgagga

SEQ ID NO: 3442 - DNA, 239 bp, Homo sapiens
  misc_feature (1)...(239): n = A,T,C or G
tccaataagaagaagttgagccaggaaagtgctttcnttcaaagagtaaattaaaagaagacaccgtgaggctcagataaacaaggcgttcgtgtcctgaagaagtcacagaaacagctgtggtgtgaggggagagtggacacgtangagaaatcggagctggtgtgatatttctgtcacaaaagactttcggaggaagggaaaagacacgtttctagagaatgaaagagtgcagcgtc

SEQ ID NO: 3443 - DNA, 282 bp, Homo sapiens
  misc_feature (1)...(282): n = A,T,C or G
tatagcctgaccggtnccatgcttnctgaagatatngccttcctanntcgaacggatcccaggaagtgtgctcatagttaatacacgttactaactatagaatgaagaatctgaaacncgctaggaaaagcttttgacanaacccaactatggatcttgacaccgttngtactntccgagattttggtattttctgtggaagccatacattgaagttgttgtctgcagtaacatgatagctcggtatgcaatgaaagaggtcttcaactggaaaaaaaaaaa

SEQ ID NO: 3444 - DNA, 277 bp, Homo sapiens
  misc_feature (1)...(277): n = A,T,C or G
agattgctgaggcccgcangaccgtggagcngntnaagctggaagtgaacatcgancgcatgaaggtgtcgcaggcagcagccgancttttggctntctgtganacgcacgctaaggatgacccactggtgactcctgtccctgccgccnanaatcccttncgngacaagcgactcttttgcaccctgctctganccctcaagacagctttatcctcccccgcagaagtatgaatccaataaacttggtgacctggtggtgcctgcaaaaaaaaaaa

SEQ ID NO: 3445 - DNA, 189 bp, Homo sapiens
  misc_feature (1)...(189): n = A,T,C or G
aagctgccttcctccaaaaacttnatctgactgaagactccgaanacatgcactgaaccctacaaaagacagacttgggaccttccanctatagatgaactctcttgccaaagccaaatggctgctgaactttggggaaagttacatgatagtgaggaaaacatagtatctatctagaataattaattg

SEQ ID NO: 3446 - DNA, 213 bp, Homo sapiens
  misc_feature (1)...(213): n = A,T,C or G
attcacttccttttcnacggtggacaatgtcagcntaaactgacctgcgggggaagccctgnatgataccaaccccagaagttgaaaagctaccacggggtgggtgctagggcgggctgtgactttgttggtagggcccttcagtgcatgtggccagccctgagttcagtctccagcgccaaataaagcagacacaacgcactaaaaaaaaaa

SEQ ID NO: 3447 - DNA, 453 bp, Homo sapiens
  misc_feature (1)...(453): n = A,T,C or G
gactgagggcctcagggggaggangcggacnggtaantgagctgacgnatntgatcagntccacgngcggntcggaccaggccgcctnacagggacncnggancntnncacagctcggaangatcaganacganctgggnacangnaactgcggggccanntggngcaaaaatggagaataagggcaagtcactccagaacttgaaggcccgggtcagggatggatgctgccacccagaaggacctctctgtgaacaaaccctaaagtatgcctcatcaatgccccagaacccagggcctcggtgcttcctaattcaatcaagcaaactgatgatcagaattcatcatcgcgggctcctcaccaagacagacagacatttggacagacaagcgtcagtaatcaaggtgacccgcttttttgangggngtagctttcttgaccttttgtcaaaa

SEQ ID NO: 3448 - DNA, 292 bp, Homo sapiens
  misc_feature (1)...(292): n = A,T,C or G
catctgcaacaaatgctgcgccnngttctttantctntatgaatncatggaacgcaagaaaagttgcactaaaacccctcctgtgactcataatgannganagccaggggccantgccttcatgaggacttttccagagctgccctgacccaccagatgggcatnccangctcttgggaaaaacntgccctctgaatanaatncanntgnatccccnaanaanacctgaccacctggctctctgctcatgtctacaagaatcttctatcctgtcctgtgccttaaggcagga

SEQ ID NO: 3449 - DNA, 482 bp, Homo sapiens
  misc_feature (1)...(482): n = A,T,C or G
gactgagggaagaagccagctgcacccagtatctccatcctttccaagcctgataacccatgtccagtcggccccatctggtcacagcaagtcagaggtggaatgagctgaatcctgtttatacactctgagaaaaacttaatctggagccagagtagcctacacagttctctttgacttttcttgttccctttgctctgtaattcagtgaccttgtaggcccagtctctcttctacacactagaatagccataggcaaggtctctgaggtctcagaacacttcactcccctcagctgactgtacccactatggaacaacctcagactgagaacccagcccctagtaaggccactagtgcagaaactgntgaattttaaaaaccatgaggccctgtctggaccananaagcatcctcaggacaaggatggtgcaaatgctgatggagcagctggagaacaggagccaggagaccaaactttg

SEQ ID NO: 3450 - DNA, 322 bp, Homo sapiens
  misc_feature (1)...(322): n = A,T,C or G
gttctgggtgctactgccaaatgttctggtacttaagtgtcgagacgcccagcctcaccaccgacttagcactgcagcagcctgtactctgcaactggccatagacgagccaccaggcttctagagtcgtctcagcaccctctcaaggtcacctgactggagcactgccgacgacgtgctcttggtcacatccctgtatagttctctgggaaagctataaatatatatattttggttattgttttgngttttccgttacattttatatcttgnatttatcgcccgatatgttttgtactttttgttttcctaaaaaaaaaaa

SEQ ID NO: 3451 - DNA, 234 bp, Homo sapiens
  misc_feature (1)...(234): n = A,T,C or G
ggggtagaggtcgcgcaaaacnnncnntttgnggaccctcaccatggnngcgggctgttnactggagaagcgaggtgtttctcaacagcaagctgcntattgggggcnaagagcntgtttttcccaaanttattttatggggacccaanngggcggnggaattttttcccccatcccccatcnaaagaaacacccttggaagntcnttgccttttaaaaaaattcccccctaat

SEQ ID NO: 3452 - DNA, 438 bp, Homo sapiens
  misc_feature (1)...(438): n = A,T,C or G
cagactgaggcactgaaagtcgccagcaaacaccatcagattgtgcatttggatctgaggagcaggcacctggactcactcaaggcaattgtttttagagagtataatcagacctgtgaaaattacagctccacaacgtctctgnaggaagcgagcctttctatgtgtttggattcaaagatcactcacgaaaacacagaagaaaaagngagggtccaccgagtcactcaagagacctttgggacctaccctcagccacagntagagttcgcacagtntaagctggaaaccaagttcaagagtaacataggggggggcctcttggccgacaggaaagagcccttccggcgccttgtaaagtnctccagtccacatcttttggaagccttgaaaaccttaactccccccgaaatgcanannccccacttttttcctggt

SEQ ID NO: 3453 - DNA, 256 bp, Homo sapiens
  misc_feature (1)...(256): n = A,T,C or G
aaaccaagttccaggagctgnggaagctcatcgacnccatgcccggnatccacgtgagccccgagcagcagcagcagcanctcnacagnctccgnaagcaagtgaggaccatataacgagctgctgcagaagtacaatgagcctntgcatgttttgagatccccaaggactaggccagcccccaggagagccgccgctcagacggaaagcatnacgcggngctccancttcttgggagccccagctcaaaactgtg

SEQ ID NO: 3454 - DNA, 159 bp, Homo sapiens
  misc_feature (1)...(159): n = A,T,C or G
ttctcactgggagagctgnagggtcacctgncatatgacctgaacccggccagngcnggaatganaaggactctacccagcacctcctcgcagtngggagcaanacgncacaatgttaggtctcgatggaagaggacagtggacaccgagccccggcgg

SEQ ID NO: 3455 - DNA, 132 bp, Homo sapiens
gaggaactgggagggggaggcaggagggccaaaagttcaagaccaccttggctacatagagaatttaaagcctgcctggcctacatgagaccttgtctcaaaaaaattaaagatttaattataaaaaaaaaa

SEQ ID NO: 3456 - DNA, 341 bp, Homo sapiens
  misc_feature (1)...(341): n = A,T,C or G
cactgagactctacaggatgatgntntgaaaaacatnttcnnaactacatgccagnctgctttgttnccttcttnctacctggtctccaaatggaaanantccggnacgaatncctcagnnggganaccgnagtctttttcacactgggatcacccacgngcagcatcttccgtgtntgctgaanaccatttnncttttggacaaccattcgagccaccaatgtgggtntctgttgtgagacacatcctgtaaatgctatcacatttgctaccagagaaattctctgcagattccaaaggttgagggaggacaaaagctagaactgtaatgaaagcggttt

SEQ ID NO: 3457 - DNA, 342 bp, Homo sapiens
  misc_feature (1)...(342): n = A,T,C or G
aactgaggccaatctggaaaagaaacactctacatgatgaccgtaagnacantntccattacgtnacctttctaacccactcngaaagcacgccaagccacctangcggggcccacatatgantcacctnaacatactgcttgaaggccggaatccttacttcagtaccctncagntggngggagangaggggtacaggaatctggttcttgggccagtccactcgaagtgtgcttttctgtcattgatctcatctttgncatgtgatatccaccntganncctttntagnngaagcnnnnngcncaaangctcaaagaacactggaataaagcttcgattg

SEQ ID NO: 3458 - DNA, 352 bp, Homo sapiens
  misc_feature (1)...(352): n = A,T,C or G
gaggatcccatctgccatgttnnaggtctgccctncactgactgactagatctctancccctatattggnacctgtcgngatgctgcaagatgaccctggnggngaaatnnatgccanaatctgnggaccaaggggaacacaagccccagtgatgaagacagcaggtaacacctgacagatgtgtgttctaccattatggtgcatacgtggctccaaccacaagaaatgcagacaacagtggagatcagggcaaggccattgtgacatggaacaggaccgctgtgctggtctcttcagggttaggaaaactgaactgntgggatgctnctgacanggtacccaatttcccct

SEQ ID NO: 3459 - DNA, 685 bp, Homo sapiens
  misc_feature (1)...(685): n = A,T,C or G
caccagccaggggcctccatgggagcttaagggccaggcagcagggctgcgggcacgagcatggtgagacaccagcccctgcaatactacgagccccaactgtgcctctcatgcctcacaggcatctatggctgccgctggaagcgctaccaacgctcgcacgatgacaccacgccggtacctctacaaccgcatgggctactggagtgactggtccgtgcccatcctggtgacctcggctgctgctttcacatacatcgcaggcctcctggtcctggcactatgtcacatcgctgtggggcagcagttgaacctgcactggatacacaagatggggctggtggtcatcctggcctccacggtggtggccatgtctgcagtggcccagctctgggaggatgagtgggaggtgctgctgatttccctgcagggcacggcaccattcctgcctcacacccaactgtccagcaggcctctggggcagaagaagccttgaggaccaggtgaacgacagactgatctgacctcangttcccacagcagcggccacaagggcaatgggccacctgggcgaacacattgggctcagtcaagcatgggccttttggccaaaaggttgcctacagtagaaaggaacccaaggggcaaagacaattaaaagctgccattttttgaaaaaaaaaaa

SEQ ID NO: 3460 - DNA, 323 bp, Homo sapiens
  misc_feature (1)...(323): n = A,T,C or G
gactgagggcaggtaaagatgngagtgagacacacgagcacctgccagtagcctgcacgcgggatgcaggcgtgggatgcaggcgcccactggcaggcgttggttggtccaagggttgcagctctccgtctgcccatgcttggagagatccgttgttcctgctcctactcaaagcacacagaaggaaacgctggcacatcggttctagaataaattaccaccctgtggaaagaccaagccgcttcctgttggaggacccccaaatgatgggagacagttttctgttaaaagaacagtaaagccattctatatacaaaaaaaaa

SEQ ID NO: 3461 - DNA, 202 bp, Homo sapiens
  misc_feature (1)...(202): n = A,T,C or G
ccgcccagcctgcctnctattagggacgtgtcccggaacactcttagggagtggtgtnggcatcataacttgagtacggatggctagaaagttgaggtctatttgagacttcggagacactcctattntaaacaagantgntatattcccnatacatctcgggaggccagaatgannnagggtcccaagaaatccaagatag

SEQ ID NO: 3462 - DNA, 303 bp, Homo sapiens
  misc_feature (1)...(303): n = A,T,C or G
tgagagtacctgatacattccctggggctgaccccatctgatcgcgctgaatttcatcatcacctcttttggcnngcnnagcgcaaggtcttctccgaaagtgaaggtgacagacaccgacttcgatggggtagaagtcccgagtatttgaaggttctccgaaaccagaagagccgctgcgacgcagcgtcatctatatccacggaggaggctgggccctggctagtgcaaatancagctactatnaccagctnntcacaacaatggctgangagctgaactccgtnctcctttctattgaat

SEQ ID NO: 3463 - DNA, 312 bp, Homo sapiens
agcctccccgtcgtcctatggattggcagcttggtgctggggctgcttgcactggtcttccttgcctaccgcctgtggaaatgctaccggccaggtcctcgcccagacactagctcatgtacacacctatgaagctccattatgccagactaaaggaggcagagagtgaccagctgcaggatttggggcatcaagatgatagtgtggcctctttccttggtggtcagcacatctataagtttctcctgacttctgggcttttctgcctgctggcccagagctaaataaaagccccgtatctaaaaaaaaaaa

SEQ ID NO: 3464 - DNA, 117 bp, Homo sapiens
  misc_feature (1)...(117): n = A,T,C or G
actgaggttgagggaagctgaggagtgacctgggaccttgcctatgatggacaaaaccgntgagctccatacctaacccttttaaaataaaattggatattgccgagaaaaaaaaaa

SEQ ID NO: 3465 - DNA, 452 bp, Homo sapiens
  misc_feature (1)...(452): n = A,T,C or G
tcttgacggaactctncanggcnggacaggaggcatggctgggtccatatntntactgccncgaatcgatgaantnganctcggnacccggggatcgaagatcctatncggaaggncctattctntagaaagtatagggactccggcctgnggcnnggnctcngcnncntnatgcttactnactggaccatacngnncatcatcttccttgaacaacgactctgnagnntgggccgggcctntggacnngacagagcgtactaaacgagagtacttcgcttggtctactgcttcgtaagagtttttcttcttctggctacacaaataagaggaagtggagaaactcacaggagggcttgcttttacagaaaatctgnttaacctgctaagcagcctgcagaaggncagaggcagntncatttttagacttcgcccctctaacttttctctag

SEQ ID NO: 3466 - DNA, 392 bp, Homo sapiens
  misc_feature (1)...(392): n = A,T,C or G
tgagctggttcgatgcccagacctgaatgctgtgctccagctgtggcctcaccggtgctgaatagagaggaagagccaccttcatagcttacatgagntggctntggntntacaacctatgntggantntacctnagtnngactggatganacnanntncncgcatntanatnntnatccnncanntgaggnctcgggncttnctctgcattgctanangacacaccctcaatcctaccaatctaagtctcccgcctttgtttgcctgccctcctcccttagactcctcatgcattcatgcacaatgaatgtcatctttttattctctgattcccttttactttaatctcaaactcttgacaagacttttactctgtcctataaaaaaaaaa

SEQ ID NO: 3467 - DNA, 153 bp, Homo sapiens
  misc_feature (1)...(153): n = A,T,C or G
gtcccccaatgacccggtancaaaaagaagacatanaaaacacnctgntntggccnatggnctcaacntcacnnnctgggggacaggctgcccatctcgttgataaattgactatgccaataaattaacatggttcactttcaaaaaaaaaaa

SEQ ID NO: 3468 - DNA, 331 bp, Homo sapiens
  misc_feature (1)...(331): n = A,T,C or G
ggatgttctgatttcctgattgcctcanacgtaccnaatcntnatntaaaccaaggtcatgacatgttgccaccgcacacgtgtncattttcaggattatcaagtgaattcatgntncnnncccacntcacctcttcactcnctgaatagaaggacttgtaaagtaaaatagcccatgagagagaatgcacatatgggagaacagangttggggccctatnagaagtgntggcacctgcacctgacctgtgagagtnactgttccagggttagctntgagacatcactcattggcttggtttggaattcttactctaaatgattcatttga

SEQ ID NO: 3469 - DNA, 196 bp, Homo sapiens
  misc_feature (1)...(196): n = A,T,C or G
cctcctggacctggaattctaaaggctggaagctgntggcnatggatgcnagccctgtgaacnanngtcctntgcatganngntccacactcctaactggtgagccatccttnccgtcccnaaagaaagaacntaaantcntntctccatccctgacttcaagctgttctacagagcantagtgataaaaaaaaaa

SEQ ID NO: 3470 - DNA, 101 bp, Homo sapiens
  misc_feature (1)...(101): n = A,T,C or G
ggtaagtctcgaaattcgatatcaagctgatccggaacccttaatataacttcgtataatgtatgctatacgaagntattaggnccctcgaaaaaaaaaaa

SEQ ID NO: 3471 - DNA, 541 bp, Homo sapiens
gtgaaaaagaagggtcagacatatatgaagaaaacctgcactacccacttctgcttattttaaccaaaacgggatagaagaaaacatcagatgcagagaaagatttccacactatatgagaactccgccacagcgcctctgggactcagggctccacccactttcgaacattccgcatcttgggactccgcccagcccattactccggccctcggcagctctcccaccctccgcagcgcgctcgctcccaccagtcctttttaaggaagcttgttgctcttccgtaccaaacctttgtgtgtttttctgtgtcagcagcctgtcttagatcagaatttgacttgtggagcaatctaaatagttttctctctaaagcacaatttcttttgatgatttccacctgccgccccccctccttttttttaattgcctttgttcttgtttggtaatagtattctttatccacaaacacagaaagcatcacccttcttttctggataaataaacaaaccttatttttctgatatctcaaaaaaaaaaa

SEQ ID NO: 3472 - DNA, 291 bp, Homo sapiens
  misc_feature (1)...(291): n = A,T,C or G
ctttgaatccctttggaacctangaagcnctnttgaagagatcctagcagccagaggagaggaggtacgccgagtgtctggtgacggtgccctggaactgattctggaggctgctgtaccccctgacaccccagaaggggatgaggatccccccaaccctggcaagatgggacagagctgatctgcatactcctacagctgcagactccagtcttcccaaaagtcgctcccttcacttggagcctcacaagcctgctgctgttccttgtcagtaaaaaaccatcacctcca

SEQ ID NO: 3473 - DNA, 103 bp, Homo sapiens
  misc_feature (1)...(103): n = A,T,C or G
ttcaagctcgccttgctaaacttcgaacnagaacncatcactcctaaaggtcccagcggcaagggggccacccaaaangtcngtacncccatgtactatgtgt

SEQ ID NO: 3474 - DNA, 502 bp, Homo sapiens
aaggggagatggccctgaagatgatgaagctggtgaccaagcaggagtagctgagctggctggccctggaggcgctaagagcagagcccaggatgcaggtgctaatgtctatccctggtgctcttctcccccgctctgccatgggatatgactctgggagcacctgctctctcccgtaccaaaagactgtggccttctgtgtctacttagaaatcagttctgcttcccaaagagtatttaaaaccagactcatttaatcaaagtgaagggttgcaatcgattggtctcttactacaaaagcagttgatagcacatgtaaatcccagcacttgagaggtagaagaagcaagaggatggatgagaggttcaaacgcatccgcagctacgtcgaaagttcaaaagcagcctatgccaaacagggagagtccctgtccccacccccacccccaaaaaagagcaaaagcaaaccacatgatttataggcaaaagcagtgggaaagac

SEQ ID NO: 3475 - DNA, 191 bp, Homo sapiens
  misc_feature (1)...(191): n = A,T,C or G
gaatattcctagcataaatttatatttccaacatcaattcgggtcattgcctctggtaggacgcacnatnatantctcaacanaaaaggcagcgcatcantacacacanactcaaacttgcttcgtcatttactcatcgttgccacanactacctactaacanttatnttttgacatggacactgctttat

SEQ ID NO: 3476 - DNA, 193 bp, Homo sapiens
gttgctccttgcaatcgtcttgctctcttggggattcgtcatctatgcatcgactgtagctgcacgacgacaactacagaaggagtttccagacaagttcttctgaacgaacttttgtaattcttagcaaacacttcttttcttcagatggcacctatgtagactcaaagtaaaattcacaatacaaaaaaaa

SEQ ID NO: 3477 - DNA, 239 bp, Homo sapiens
ttaagcaccggggccctgggaaaagatgtggccgccatgaggcttggtatccccatttgcaacccagagccaagggttcctccctgttatggttgctgggcgattctgaggcactcctccacactcctttgtggcaccaatcattgacgtgtgacccaaccaagaagaatccacgtggccttgtactttatcctcactgcttaaggtgcccagaataaaagctaaccctttcttcttca

SEQ ID NO: 3478 - DNA, 425 bp, Homo sapiens; identical to SEQ ID NO: 25
  misc_feature (1)...(425): n = A,T,C or G

SEQ ID NO: 3479 - DNA, 273 bp, Homo sapiens
  misc_feature (1)...(273): n = A,T,C or G
atccttgaacttcagantctnctagntntccntcccaagtgcangcagggatcacagacactgatccattgcacccagcttacagggaagaatggtggctgagtctggcntgactgccttaaatgaaatgatagaantgtntcttttcanatnnttnctntntgtgnattaaangtgtgtgtctactctgcttncagctgaaaggtccctgagacagnccaaagacacaccctgtagatcgcctaagggctggctccaggtaccaagaatggg

SEQ ID NO: 3480 - DNA, 264 bp, Homo sapiens
  misc_feature (1)...(264): n = A,T,C or G
cttccgtcagagaataagcacgtgtaccctaggaactacatagtgaataagagatgtactgcccacctgtaagccgcactacttatgtactgttagcaaataatgaagattgactgaacctgtctaaaaatctaaggaatgtacccataaaagtcacaatgaggtgttanntgngnnatgtgtgnnttgggagcctctgccatttgtcagactgcacagcaagccaaatgtanaatggacgaagtagtaaagctcttgtcacca

SEQ ID NO: 3481 - DNA, 460 bp, Homo sapiens
  misc_feature (1)...(460): n = A,T,C or G
catctctactgttagagactcaggccaggaaacgtctctacttccccatcttctacacctaccccaaatggcaaccacaagtccaatgtgatcaggaagaaacaggtccacctcgaattggctgttaccatatctcaacagaaaacacggagaattcgaaattcgacgggattaaaggacgcgtgaaaggtttgagagaagagagatgccgctattgaatctgctggagttttacatcccaagatgaagacagcattcagaattgatgtgatttccttgaatgtggcttaggaaatgtggacacttaaaactctcacttgaaattgggcacaggtttgatgtagagataaggacggggtgcggaatggagacccattttgtcattgattcatctgaccgataaggccatagtgcanttaggtgatattcgaaagcttctttgatgctctttatgtatatg

SEQ ID NO: 3482 - DNA, 399 bp, Homo sapiens
cttctaacatccgtgtttgacaatagcatcaagacctttggagtaattgagagtgacccgtttgactgggagaagagtggaactgatggctccctgacaaccaccaccacctctgccacccctcagctgcacacccgcctgacccctgctgctatcggaattgcaaatgccacccccatcccaggagacttgcttcgagaaaatacagatgaagtgtttccagatgaacagcttagtgatggggagaatggaatccctgttggtgtatcaccagataaattgcctggatctctggggcacccacgccctcaggaaaaggatgtctgggaagagatggatatcaacaagaacaagataaagctgggaatttgcaaagtgtgtatttcttaaaaaaaaaaa

SEQ ID NO: 3483 - DNA, 207 bp, Homo sapiens
  misc_feature (1)...(207): n = A,T,C or G
tcgatcagcggtggaccgnagagggagcatncttcgcatcagangtctaccgtgcacattctggaanaganaattttgaacttcatggttaccaaacgaacaannccaagactgatgagttgacctacttctaagcngcaaattctaaagtgatctgattccgttcattagagatttagccatgaataaagaagcattcttcaaata

SEQ ID NO: 3484 - DNA, 310 bp, Homo sapiens
gttctatcagaaatacttgagctgtgctgagggggcaggaagaggaaagttccagccaatgaagagtcacgagagggaatgtgcctttgcttcgcgttccggagaccccttgacttgcttgcctagtccctacaaccgctgagttgataattctgtccgggagagcttctctgcaggggctgctgggtaatgcttgtgacctcatttcctggttggaagctgaactctgaagggcttggcagttctgtttttttctttttttcttttttctcctacaataaatttctctgtgatctccataaaaaaaaaa

SEQ ID NO: 3485 - DNA, 554 bp, Homo sapiens
  misc_feature (1)...(554): n = A,T,C or G
gatgtgctatgaacaatttcctcgagtccctgcggctgtgacttccctgctatgctggactataacatggaactaggagcagagaggaaccctgcggtcacttcctcttctacattgcttttgtcaagtattttatcacatcaatctgaaacttaatttctaaacagagaatgtcatgatgttgtaagtttatagatgttttatggataggcctagtaattagtgctgaaatgtaagttctgtgtgatcgttgggtgtgtccaacatcccaccagtagccttgggaggagcccaagtggccgcacaattgaacaagccaaagcccaagacaatgtatcctgctacaatgaaagccttgtgctactttagaaacctgattgccagcaacattgtatccagcctatcacacatgcaatgaaatggtaactctttgttctgtcagagctaaatcactatttgggcaaattcatctccttggtgngctcagcattacagaataatataatatctgagtaggaaagtaggatnanngaaatgggctttttccttgagcc

SEQ ID NO: 3486 - DNA, 286 bp, Homo sapiens
gagtgctgatcccagccgggagtatctcatcccatcagctacactaagcccacagcaagatgcaggattataaagctactggaaacagcatagagacaacctggaagagtgccctgctccacacagccctaaagggcccaggggagcactggacacactgtcaatgaagcatccgtcctgtcccttcctctctgtttccctgccctttccactcttctggacccagcctctgaagactgtcatgtcctgcacaattaaaatcttgttgccaccctaaaaaaaaaaa

SEQ ID NO: 3487 - DNA, 421 bp, Homo sapiens
  misc_feature (1)...(421): n = A,T,C or G
aactgaagcagaaagaagtgtatgtctacngtctctggaccaaaggcctcanagaaatctgacctgggcttctgagaaggggaccacagagatactgttctctaccaggatggttgcaatctccccttccagatcaccgattctccctaagacacgcacaaaatgnccatttggatacactgatgttgcctcccaggagtcaatgcgcacaaccaccctgaaatcctgcacaaagggaaaaatacaaagtcaaccaaggctggagttaaatggcccaatctgaagcatcagactaaccagatgaacagagcagagcacacacaggccgacctgcaaacggcggcttgcagaggcttactctgctctctggntgctggtcttggcaatttttaaaatggccggttggtttgcaagccactgg

SEQ ID NO: 3488 - DNA, 485 bp, Homo sapiens
  misc_feature (1)...(485): n = A,T,C or G
gattcgcctccccctgaagtaaatcggattttgtatataaggaatttgccatacaaaatcacagcagaagaaatgtatgatatatttgggaaatatggacctattcgtcaaatcagagtagggaatacacctgaaaccagaggaacagcctatgtggtctatgaggacatctttgatgctaagaatgcctgcgaccacctatcaggattcaacgtttgtaacagataccttgtggttttgtattacaatgctaaccgggcatttcagaagatggacaccaagaagaaggaggagcagcttgaacttctcaagggaaaagtatgggcattcaaccccagatccttcccaaggtggaatggacaggccacgccgtnggncccttgggttaccctgggnncttctttcttcttttcctttttttnaatttaggtancctgggaataatttgggggaaatttncctttaatttttggggggaaaccttt

SEQ ID NO: 3489 - DNA, 400 bp, Homo sapiens
ataccaagaatttctaaccaaagtattaatcaggctcctgttgcaagattaccagttgctgcccacagaagagccattgtccacagaggatcctgatgcgaaggtttaccaagtagataccaatggtgaaagccagccacaccccagaatggacaacacccctagacagcaggaagcagcttaagagacacgccaccctcattcccttttcaccaccagctttcccctcatttcttccccttctctttataataacaagaagggaggtatgttggtatcaggacctctgaaacctgtgacatcacataggcaacaatgtgacctacacacttgttgccaagacaatggccaccatattcccagcatccactggactcaccttccacctttatctttacct

SEQ ID NO: 3490 - DNA, 310 bp, Homo sapiens
ggaccgtggctaggctccattcctgtttgctcctttctcaggattccttcaagggtcacctctggctgttacaaagtagctggagggacaaataagaaaacccaacaatagggcaaggtcacaaagtttctaaatgaaactgtacagagagatgaaagatttgggccttgaaataggcggtttgtatcccttctccaagtagagccctggaggcattttggaggcctggggtgtaacttacagcacatagctttttggtttctggagacaacctgtcaataaaagctggtttccctggtaaaaaaaaaaa

SEQ ID NO: 3491 - DNA, 260 bp, Homo sapiens
ggaaatatgctggctagctggtgggagactctgcagttgaccttgaattcccttgacctcccgtgtccagacaaagatttcccactccatgctactgctgaagtctccgaccaatgaagcagacgagggagaaccaatcccactcccacccattcttctgcagccaacagctggattgatctccaaacaagtcggaagagatgcgtaattgaattaaaatcataataaattgaagccaactcgttcgattaaaaaaaaaa

SEQ ID NO: 3492 - DNA, 104 bp, Homo sapiens
  misc_feature (1)...(104): n = A,T,C or G
tatggcatttgcctcgnttncanggggttccaagcagtgagatcacgcagttagctgggttataccttcttntctttctccctntgtcccatctgagccagcca

SEQ ID NO: 3493 - DNA, 434 bp, Homo sapiens
  misc_feature (1)...(434): n = A,T,C or G
agggctatgatgaatcaaaaacctaagtccctggctcctactcagacaatcctcagcaattccgacatcaacaaaagcaagcaggaagcaaatttgtagacctcttcagttttgctgagctgtgttggttatctccagatgttttctgtactattctcagaggcatatttgcagtagataggccagtgtttaagagcagcaggccagcaacaaagcaatggtatcctaagtgggatctgtgctcttggctgagctgccccagcctctcagccgcacacggggagtctactagtttgggcagcgaagacacatatctggctgcgcttcaattactggcaaacagtgatctgggacttcagcctnaaacagaaaccnancggttaatngtgatctagtgggagcctgcaggggtttcttaagaggaagtacttaat

SEQ ID NO: 3494 - DNA, 361 bp, Homo sapiens
gcgtgcgccatcgtgctggagtgaagtccgaaaagacaagaactgaagccaagaagagcacgaaattgaaatgttgttttaatcctggggttatccggaattgggtgaccttgagcgaattattcaacctctgagtactccgtgtccacatatcgcaggagctatgtatttgtcttgttgttgttcttgtttaaatggttttcccccatttaactcgcaaactaacccaccgaggtagactctgggaatggaaagataagctgagttcaggatttatctggtctccttttaagtcctttcattacttactgtgccacctcgtctaaattaaattcattgctccacctgcctcatgcaaaac

SEQ ID NO: 3495 - DNA, 348 bp, Homo sapiens
  misc_feature (1)...(348): n = A,T,C or G
aggacaaatgcacggtatgaagcctgacctacaccgnanaagagaaantcctnnntcctgtgtgcccacccccgaagtgccctgagccttgtcctcnngcaaagtgccctgagccttgtcctcccccagtatgctgtgagcattgtnctnntnnaaagtgccctgagccttgtnctnccccagtatgctgtgagccttgtcctcccccagngngctgngagccatgcccccctcagccatggcagccaaaatgccctcctgtgcaatttccaccatgccagcagaagtgttcanccaagaataaatgagggtttcccagtcatcaggactgggaagtaagagaaatct

SEQ ID NO: 3496 - DNA, 255 bp, Homo sapiens
  misc_feature (1)...(255): n = A,T,C or G
agcaagttgctggagaaacccanctctctgcatgcctctgacgcaaactctgcccccagagcagacgcctgaaaatgaaaaccaggaatgaaacagggccaggattacacaaatcttcctaaaagagacaaactcttaggtacttttgaacttatctatttggtttattgttgatgctttgctttctgagacagtcttatcaggtccaggctggccctgaactagctctgtgctggagacgacctcaccctgatt

SEQ ID NO: 3497 - DNA, 148 bp, Homo sapiens
  misc_feature (1)...(148): n = A,T,C or G
agagtatcttgggaggccaaccncaaaggtctttnggattaacncaccacannngcacantgtgaggancggcntgcnnacgcttacggctatgcaaggcacagatctttcccagcatgggaaagatcctncctccctctctctctct

SEQ ID NO: 3498 - DNA, 317 bp, Homo sapiens
ggaaacagagggctactcaggctccgacattaagctggtctgcagggaggcagccatgcggcctgtgcgaaagatcttcagtgtgcttgaaaacaaccagtcagagagcaacaatttacctgggatccagctggacactgtgaccacacaggactttctggatgttttggctcacaccaagccttcagcaaagaatctgaccgagagatacttggcctggcaagagaagtttgagtctgtataaagctgtgcccagcctgacctggccagaggcagccgagagcctccccagcgtgactgggatggaagggaggaag

SEQ ID NO: 3499 - DNA, 357 bp, Homo sapiens
  misc_feature (1)...(357): n = A,T,C or G
gtctccgcttcatttgtccaaacctgcatcaagccaaggccttggagggaacaaatgacggttctgaggagtttcctggaaggcttaatcataggaggcaaaggtggggaaaagccacagtggcagtgaggcctccgaggctcacaacagtgcggagcctataacactccaggcctgaaggggcagagggagggggagctttgtggagtaagagatcacctanaaagaaggttgtaggtggagccagggactttggagagaagctgggtgagccacagggcttaaggagcatcaacaccccccattccccactgtcgtccttctcggagcaccaccatgtaaccaggaacaccctgg

SEQ ID NO: 3500 - DNA, 170 bp, Homo sapiens
  misc_feature (1)...(170): n = A,T,C or G
gaatgaagacaccggaggaatatatcaaaccttgctgtgccaaggccccgtggaactcacaagggggaagaaaaggaacaaaagnnntatnncnnnatncaatnggntatcgnganaaattantcattggagatattcacggaagacatcccangctgtgacagtgtatg

SEQ ID NO: 3501 - DNA, 160 bp, Homo sapiens
  misc_feature (1)...(160): n = A,T,C or G
gaagaagaggaagaactangtggtaagagcggcctccagtttcgaactaccttactagaattggaaggctgagctcgagtcctcagagatcaagtccagccagagtcttcagagatcaagtccagccagagtcttcagagatcaagtcccagagtcttca

SEQ ID NO: 3502 - DNA, 685 bp, Homo sapiens
  misc_feature (1)...(685): n = A,T,C or G
gtaaggaactgccaatcacgtgaccgtgcgcaggcagtggcatcatcataactcgcggagggacatccgccttgatcctggcatattttgcttattatttttactttaagagaaagtgtgagtgagcaggggtcagttcagtgtttagttggttactttcacaacccccaaggcttgatgctgaatgggcttgaagattttgtacatacgtgtgtgcacatgcacacagtgcagaaagccagtgtttttatttgtgaggtgtttttgtcagtagttcacaatatggagaataattcacagagacttgatagtaaagctttacaaagactaaacctaactgaaacagaagggtgttcatattgctctgacttcatactttggagcaagctcggtcaatgggataatgactcttacctgagattcctttaaattcgctcagtgatcacttggatacccctgcaaatgagaaaatgcagtttcccacctgccaatcacaccttcangctgtgggttttttgntttggttttattgnggttaaaaacgctatataacaccacatgtgtgtgctgntatgtagtcatatgtggttacgtgtggttgcttcacaatgnacatgcatcgtgggnaatttgccgttggttttccctcttagctggtataccacaatgcttggaaaaaaaaaaa

SEQ ID NO: 3503 - DNA, 257 bp, Homo sapiens
atgccaggggagcagatgaactgtcccttcaaattggagacaccgtgcacatcctagaaacttatgaaggtaagtgaggcttgatggctccctgttggggatttgggatgacgcttcagggtcttctcgggaaagtgcttctctgtcagggtgctaccttctcaggaaggacactttccccacagatagatgctcttccaggcaaaggttgctcgggcagctatttgttaaattcagttgaggctttaaaaaaaaaa

SEQ ID NO: 3504 - DNA, 107 bp, Homo sapiens
gtacaggtcaagttcttggggcccacttctgagtttagaagacctattaccaaaagtgaagaactagactgtgggaaaataaatggcttttgactacaaaaaaaaaa

SEQ ID NO: 3505 - DNA, 398 bp, Homo sapiens
  misc_feature (1)...(398): n = A,T,C or G
acatgctggtgtctatacagctgaagaagtggctcttattatgagagaaaagctaattcgtttgcagtctttgtacattgatcagtttaaaagactccaacacctgctcaaagagaagaagcgccgctatttacacaaccggaaagtggagcacgaggctttaggtagtagtctcctgactggccctgagggacttttggccaaagagagagagaatttaaagcgactaaaatgtcttaggcgataccgtcaacgctatggagtagaagccttactacacaggcagctgaaggaacgcagaatgctggccaccgatggggctgctcaacaggctcacaccactcgntccagtcagaagggcttaacccttggggatgangtnccctgtccaatcagct

SEQ ID NO: 3506 - DNA, 118 bp, Homo sapiens
  misc_feature (1)...(118): n = A,T,C or G
taaatacaatgccacaataatgactctggagcangttaagaatgcagcagtaacagggagacttgatcatgttctctggaatagtctaaaggaatgctcttgaacaacaggaattata

SEQ ID NO: 3507 - DNA, 193 bp, Homo sapiens
ttgatgaagtgccagccagttcgtcggctcagtgaacctggggagttgaggcgagaatatgaagaggagataagcagggtggaggctgagcgacaagccagcaaggaagaggaaaacaaagccagtgaggagtacatccagagattgttggctgaggaggaggaggaggagaaaagacagagagaaaaaaaaa

SEQ ID NO: 3508 - DNA, 710 bp, Homo sapiens
  misc_feature (1)...(710): n = A,T,C or G
atgttccgaaattaacaaatataaactttatccctggatccatcagtttagcaataatcggagatcagctgatcagatccgacccattcttttccctgatgttgacccccacagtcttcctcctggttctaacttttccatgacagcaggagactttcaggagatttactctgaatgcaatgcctgggactgtattgccacctgnttcttcatagacacagctcacaatgtaattgattatattgatacgatatggagaatactcaagccaggtggaatctggataaatcttggtcctctactataccattttgaaaatctggcnaatgaactgtctatagaattgagctatgaggatattaaaaatgttgttcttcagtatggatttcagctagaggtggagaaagaatctgtattgncaacatatactgtgaatgatctctctatgatgaaatactactatgagtgtgaactggttgtggncggaaccacaataatggtcttaagtgctattacccagaagaacatttaataagagtaaatgatgaaatgacaactcanagtcactatcggtgaccacaggacacaaccttcaaatcantgggtgccttcttaatnctaaccaatttacaaatagnggctattttcttaatgangcnattgnttttttcagaatatacttgccgggcaaatttatcccacccagtata

SEQ ID NO: 3509 - DNA, 345 bp, Homo sapiens
aagcctagatttggaatcctcactcggtggcagtggtggccctggtcgtcttcatctcgagagtctcatgaacctgtgggtctggttgtctcagctgactgacctgggaatggctagaacggaacagccaagcacgggcatgtctgctgtcctcacggcagccctgttgcatctggcagggctctagctctctccaaacatgactgctgccagcccagtgctgtgggattgtctatagccaagttttgtagagccagtggcatctggttttgttgttgttttggtttttttgttttgttttaatgtcctaataaaaccttaaaagcatgcacatcaaaaaaaaaa

SEQ ID NO: 3510 - DNA, 194 bp, Homo sapiens
  misc_feature (1)...(194): n = A,T,C or G
gctggctcgagtgtggaagnctgcctgcccaaagaactggacgtgaaactgntgactngcatttgatgtttgctttgggcctgaantggtgncannnatngagctcacccccnnngagctattgctgaacaggtncacttnccccacatngtaataactttccttttccactgcctctgctgggtgctgggcta

SEQ ID NO: 3511 - DNA, 270 bp, Homo sapiens
ctgtgctgatgtccttgcaaaggcaggagaagtccatgtgacactgtgcagaggacaaggtggaacgcctgctgacaagcctcagagagagtggcacaacagttggcaagtagttgccatggcagccctgggagggttcattttaagtgatgtgtgtccctttagctgtgaggctgtgccaggatacaagtgcactgggtataggtaagtaagaccatgggcctaaaccttctcccctttcgtcttttgcatgaagtattaaaaaaaaaa

SEQ ID NO: 3512 - DNA, 261 bp, Homo sapiens
  misc_feature (1)...(261): n = A,T,C or G
gatgacttcgagaggcntgcngcgacctacacagagcgtgcgctgcgacgactcttccgcaccttggatcgnnacccagcactggcggagagagncntgcggaagggcaagcagantgagttcgagcancgcgggctcctntgcancctctgggngnganctgggngcaccntgcanccaaagccaannaactccctnaacttggngnntattatggtnttcaaantgnggactgngacaaagcaagttggtgtacaggaa

SEQ ID NO: 3513 - DNA, 187 bp, Homo sapiens
ctgcttcagcaccagcctgtccagctgacttccctgttggatcagtatgtcaaagagcaaaacgagggagattgtgccacgtcagccaatgagaagctacatcctcccgatcctgctccagatgcctagccggcctgttttacccagctctgcccataaacacactctgtccctgtaaaaaaaaaaa

SEQ ID NO: 3514 - DNA, 394 bp, Homo sapiens
  misc_feature (1)...(394): n = A,T,C or G
atcgatcacacatggactgttccaaagattcgattggaagagcaaccgttcaaggtttgctttactctgtgttctcttgaanancnagtgaacngnacagagcatggttacnaaactgggacgcanacatggacacangcccccactgantnccttgtgtctngacaggcacacctganatntgacntgantngagggttctcaatgggtgaggcaaanagctatacatgttgacacaccttataaccacaagcttaattctcaagataagttgatatacagaacagtaacttgctactctgtgaaccccatcacccaggtgtaatagcgtctagacttttgaaaatgatgccttaccagaagtttgcgatggggtgngttctttttgtatcct

SEQ ID NO: 3515 - DNA, 136 bp, Homo sapiens
  misc_feature (1)...(136): n = A,T,C or G
cttccaaccttctattatntgggacatntctttatcttnaanttactttttttttctagtntatnccattnnatangantctctcngtccaaaccttctaccacaacaatggacacaatgggtaccccattaaaaa

SEQ ID NO: 3516 - DNA, 173 bp, Homo sapiens
  misc_feature (1)...(173): n = A,T,C or G
ttaatgattcttttctgcgggatcaagaagatgggtactatcccgagctagtatctcgccagcaagaattcactcggacaattcttctacggcaaagctttattgcttcatctgaaggaagaccccgaacaaggaaaatggngctgcttatatacccctccgtgagatgccag

SEQ ID NO: 3517 - DNA, 354 bp, Homo sapiens
  misc_feature (1)...(354): n = A,T,C or G
gcaccgagtcaaaagcatggtcagcagcatggatgctgtctgctctgcttcccgtggaacctttccaagtgctccctttgcccgctgcctcttactctgcattctccttaaggaccaaccttcttgatcttgatcgaacaacccaatttattttagttttaaaatttcctccaagaatactcttctagatttggactcttagtttcttccaaataatcaagccaagccntgagagcagggcagacagctttacttttggtaaggaaagcaggcttagaaaagtggtgttacccagtgcctcaataaaacagctcagtacaaataaccatttggggggataaagaagtcttactg

SEQ ID NO: 3518 - DNA, 300 bp, Homo sapiens
  misc_feature (1)...(300): n = A,T,C or G
cctctgaaggcccaggaacccggaggtgttctgctgagagtcgacatcattggatggggggagagcagaagggagggacacgaaaggccatgggggagcagcancagcaagaccctcagtcgacacattgcaggtgggtgggaggctgtgacanggncagtttcagatnccacaatcacnccttgtnggntntttccaggntcngnaagatggcaggacttgntanggacaccgaccggatacggacatntaatatccagttctggtctctnagcctgggcaaattactggagcgttttt

SEQ ID NO: 3519 - DNA, 239 bp, Homo sapiens
  misc_feature (1)...(239): n = A,T,C or G
ctgagtaatggtcagcaagacccagaaagcagacctgggcccacaactcccagagaagaagaaaaagaagaagaagaatgngagagtggttgcaaatgtcncagaaccagagactcaatactcagtcttaaacagnaatgattattttatagacgcttctcctncgagggccacgtccccttctaacaatgtggatgaggtgcagatccccgagatgtcactgagcaagagaaaaaaaa

SEQ ID NO: 3520 - DNA, 133 bp, Homo sapiens
actgagggtggacctgcatgatttcttcctggggatgtcatggctgaaaacacacgacagaaaccagattgagaaactcctaaacagagtgaaggaactggaacaggaggtggaaagacttaagaaaaaaaaa

SEQ ID NO: 3521 - DNA, 495 bp, Homo sapiens
  misc_feature (1)...(495): n = A,T,C or G
ttatttatttttggaaatcaagttcaatattaaaaagaaagagcacacattattggaagccatttctactaattcgntacattntaacttatgattngatttgaatactgtcatgggaggagctgtgagtgctggggaagataatgatgacttaattgataaccttaaagaagctcagaacatccgaactgaaagagtagagcaagccttcagagccattgaccgcggagattactatctggaaggctaccgagacaatgctnacnaagacttaancctggaagcacgggaacatncacttggcaaccaccttgcatttattctgaanttatgggaagcttttgaaacttcaaccatggatnatcttttcttanccctgggaaggtggaacccggatntttangntncaatgggtggngcttaatttttagggtaattttattttnggaaattctctcctttataaaagtgagcntaagttttcattggcttctt

SEQ ID NO: 3522 - DNA, 427 bp, Homo sapiens
  misc_feature (1)...(427): n = A,T,C or G
gactgaggcatttcacccacccagctctctaagcacggaaaccttggacacgtgaacatcagcgccatccaggaacctctcgcctttattttgcctaagagagaaacagttttctgtttagatgagcaggagctggggccggacatcgtggccccagctccagagctccctgcggagcagcggagcatggagcctgtaacagagaagagggaaccaggggagccgctgcctcaggagcccgtggagggggagccgctgccagccgagccaccgagtgagggaggagccataggcagtgtcccctgcccgcagcctggggagcagccctgagggtacgcgcttctgcagcgggaaggtgtgtgcagttgctttgcccangatagcgcgggccctggggnatttgcacttttataaaaaccgcacctgg

SEQ ID NO: 3523 - DNA, 352 bp, Homo sapiens
  misc_feature (1)...(352): n = A,T,C or G
agactgaggtctcatactgnatgttgatgaacaactgtccaagtcagtgaaagataaggtattgctgccttgccgttacaactctcctcatgaagatgagtctgaagaccgaatctactggcaaaaacatgacaaagtggtgctgtctgtcattgctgggaaactaaaagtgtggcccgagtataagaaccggactttatatgacaacactacctactctcttatcatcctgggcctggtcctttcagaccggggcacatacagctgtgtcgttcaaaagaaggaaagaggaacgtatgaagttaaacacttggctttagtaaagttgtccatcaaaggttaaaaaaaaaaa

SEQ ID NO: 3524 - DNA, 316 bp, Homo sapiens
  misc_feature (1)...(316): n = A,T,C or G
agagcatgggttggacctattanatacaacagagctgaacatggaggattnctgatgggactttangcctctccccttctccacttaccactgcaagtccttgagtgagcagaaggaaggagtaaaatgaagcattctttgggtcctagccaagtactttaaaggaaaagagaaatggccttatttttcaaatctctatttctttctgaagtgggtgctatatatagatgctatgagccttgncatccttaatgcgccatcgctttatgcttttgcctgtttgcaagtgataggagttgggtagggagggctttac

SEQ ID NO: 3525 - DNA, 414 bp, Homo sapiens
  misc_feature (1)...(414): n = A,T,C or G
tttgccttgttagcagccgtttggtttcgaacttatctacactcaagcaaaactagctcttttatcagacacgtagttgctacccttttgggcctttatcttgcatttttttgctttggatggtatgccttacactttcttgtacaaagngggatttcctactgcatcatgatcatagcaggagtggagagcatgcagcaatctccanaagtttctctgactatgttctgcttctgactgacccctgcgctcagtctcatgtgtgcgagtctgttcaggcatgtaccaaaacaccgtctccgttccagatactccggtacatctgagacatctgaggtctgggccgagcccagccaagcagaggatatgggcaccaagaggaacatccganaaacagattaccaccttgcgaca

SEQ ID NO: 3526 - DNA, 236 bp, Homo sapiens
  misc_feature (1)...(236): n = A,T,C or G
gaacacgtccgtgtcatacancngncaccttgttgaaggcaccnccgctgntnagcgtgnaggcaagnagnagcacnttgacagncaacagcaccgacagnaggcgnncgccctttttccacacctcacggnggctggcccgaggccccngcnggctctcattgggatgngggaccagttcntncgacatggtgggggcngactggaggaggttgaagggatcacttgcgaggtcc

SEQ ID NO: 3527 - DNA, 110 bp, Homo sapiens
  misc_feature (1)...(110): n = A,T,C or G
gaagtctcgatcactagacgggagatgctgccaagtgccccagacgggatcaagactccaatgacaaccntaagattccctaaagctaagacactgctgaaaaaaaaaaa

SEQ ID NO: 3528 - DNA, 203 bp, Homo sapiens
  misc_feature (1)...(203): n = A,T,C or G
accaaaacactgaagaatattgtcaaagttccagaaaacatggaaggcatgaaagangtcgnactggagaaaaaccctctgaaaatactaaatgtggtaaagcctttgcatgtcacagtcatccccaaaagtatgaaaganttcatactgnagagaaacccnatgatggtattcaagtatggtgaagcctttgtacatcactg

SEQ ID NO: 3529 - DNA, 360 bp, Homo sapiens
  misc_feature (1)...(360): n = A,T,C or G
ccagtagaagacatttcttttnntggagacaaagggatatctcccacagtgnggtttcaccggctgctgttctcccgcacatcctgtccccaagcgcatanagaagccgtactanggagancgacaggcattgtgcccgnactggggagacagcatacaattgaatcgatnaagatnangattcaagggcttcatgaggcttgtcggctggcgagacacgtcctcctcctggctgggaagagtttaaaggtggacatgaccactgaganagatagatgcgcttgttcatagggaaatcatnaggcatgacgcatattcctccactctgggctatggacactttncaaaatctgttttgac

SEQ ID NO: 3530 - DNA, 150 bp, Homo sapiens
  misc_feature (1)...(150): n = A,T,C or G
ggattcctgtgtgactgcacggntgcaatcggcgatgtgtacttcaaggcacacaaatcagttctcgcttcattctccaattactttaagatgttgtttgtccatcagaccaggtaactaaagtgcttgataataacctaaaaaaaaaaa

SEQ ID NO: 3531 - DNA, 262 bp, Homo sapiens
  misc_feature (1)...(262): n = A,T,C or G
gttgaaccccttgaaaccctctngtganagtctctatcactanacgggagatgctgccaagtgccccagacgggatcaagactccaatgacaaccataagattccctaaagctaagacactgcagatcttgactctgctgatttctataggtgtggtccaaactagtcctatgccccatgaaccccataaccttacttgggttataactaacactgctacggggactgtaattaactngacctnccacctttgcccccattg

SEQ ID NO: 3532 - DNA, 106 bp, Homo sapiens
  misc_feature (1)...(106): n = A,T,C or G
agtctcgatcactagacgggagatgctgccaagtgccccagacgggatcaagactccnatgacnaccataagattccctaaagctaagacactgcaaaaaaaaaaa

SEQ ID NO: 3533 - DNA, 243 bp, Homo sapiens
ttttagtggtttcgcttcctggcactgcactggcttccataaggacattttcctacaaggacagatgatgctttgagcacaggactctaccccactctccctgtctcctttctcactcccttctctttgttccctttgtttctctaccaagtgagttggcctgagggtcactggtgctccagcgcagctatgtgtgtgacccaacacaagataataaacttatttaaaacttaaaaaaaaaaa

SEQ ID NO: 3534 - DNA, 139 bp, Homo sapiens
gactgagggtttttctgtgttacctggctatcctgtaactaggctctgcagaccatgttggcctcaaactcaagaaattcacctaccttctgccttccaagtgctaggattaaaggtgtgtattaccacaaaaaaaaaa

SEQ ID NO: 3535 - DNA, 104 bp, Homo sapiens
  misc_feature (1)...(104): n = A,T,C or G
gaggtatgcaccgaactgcnatcttcncgagttnccactaaaanactgacctatntactttaaanaaactttncntgggtagggatgggcctcccctttttttt

SEQ ID NO: 3536 - DNA, 282 bp, Homo sapiens
  misc_feature (1)...(282): n = A,T,C or G
actgaggtactgaggccatgttcccngagtggnttcctnctttgnctcttcttatggcancaccaccttcaagtactttcaggacctccgcaacncaggcttggagaanagctatgcgctcctcantgggggttgctttcccaccatcttctcccctaactnccccctggtctgactgatacactccagaactggggatcganggctgcaccancccacctacagtcgatccaancaggacaacgggcgcaccactgagctcactaacttttacaagacatg

SEQ ID NO: 3537 - DNA, 315 bp, Homo sapiens
  misc_feature (1)...(315): n = A,T,C or G
gcctcatccggggctgttttgttgcgtccgaaganctgcanggactgcngngnacccttggacannntagntccgaacncaancacnagctccacnccgngcagcgccnngaccggnaaaggnatctatcaccttttaaaggagcacattaaatgtcctctctgattgaagcctgccaagagggctcagtatgtaaaggccttgctactaagcctgaggacccaagttcaatctccaggacccaaatagaggaaaaggactcctgaaagttgtccttggacccccacacatgtactgtgatgggcccccgtgtac

SEQ ID NO: 3538 - DNA, 259 bp, Homo sapiens
  misc_feature (1)...(259): n = A,T,C or G
gacctgagggggggtctttcatgaagtgtttgctagtggatcaagctgctgctgcctgctgacctgaactgaactgccaatttccagacaacacagatgggagttgctccaaagaacttttctaaaaaggtctttgccactcaactttgctcagcttgnatgttaactccaggagtgcacctgaagacctaaaagcattttacatgcagatattatctccaaacaataaagngtgacttttcttttccaaaaaaaaaaa

SEQ ID NO: 3539 - DNA, 140 bp, Homo sapiens
  misc_feature (1)...(140): n = A,T,C or G
actgtgggatataacgantcctatgtgagccnnganggngangntaagaatgtcanctctttcanaggaaggattgaccgcaaagaactgagcgattganaaagaatgcggcatcacagctggcaatccgaaagataaaa

SEQ ID NO: 3540 - DNA, 207 bp, Homo sapiens
  misc_feature (1)...(207): n = A,T,C or G
gcggaagacctcgcctcctccgantntacatcatnaaaggtnattgacgngctttccctagtggtgaacaccatacagctctttgggcccccagtttcctgttaagcctggctggggacccatgtctgaccttatctccgtctcctcctaagcaatacaattttccctagggaaaagattctagaaatagtaactactacataaatg

SEQ ID NO: 3541 - DNA, 105 bp, Homo sapiens
  misc_feature (1)...(105): n = A,T,C or G
tttaaatcccagctgaagtgactttgngctccaggtagcagcctgggcagtaggccataattacttcttgtggaactctcaaaggtcggccggggaaaaaaaaaa

SEQ ID NO: 3542 - DNA, 312 bp, Homo sapiens
aactgagatctgggagagcgtctggaagaacaaaggcaacagaaaggaagaatgactgcagatgcgctcatggctggggcttcatatcccagaagccatatactgataagtggaaaacccagtgccagggtgggctacctctatacatttctggacgcggagtcttctgaggcctccaaaaccataaaagctgatgtcatgtactaaatagttttttgtcaacacaagctaaagtcatctgagaggaaagaacctcagataacatttctccatgcactgagctgtacagcagcttgttgggaattttctatt

SEQ ID NO: 3543 - DNA, 207 bp, Homo sapiens
  misc_feature (1)...(207): n = A,T,C or G
gacacacagaatcacgcctggngnnanccgggccttgatggaaaccttgcaactntncatttaanaataaagggagaagggctgangagatggctnaacggntaaaaacactgantgcttttccaagagtcctgaattcnattcccancaaccacatagtggctnacaaccatntgtaangggatctcatgccctcttttggtgtgt

SEQ ID NO: 3544 - DNA, 418 bp, Homo sapiens
  misc_feature (1)...(418): n = A,T,C or G
gaactgaggtgtataggtgtgaaccaagtgcacgtctagttcccttggaggccagaaagaaggcggtgtcngatccccaggaaccatagttacagatggttgatgtggaaactcnaacaggatgcnactgtttttnactattttganggnccagccaccnnanctttaaggncngggnattttttnanactgncantnntgannncggancnctccacaatanaatntcttgnttntcttgtggccccnaggatnacaccgntaggatangacactggccttgctttaccttcagagtntggccttgcataatggacnanattnattccttcagttgntctctgacctccacatgcngtcctgtgcatgggtgtatgcattcacatantcacacatcccccgttgttaaataaataaa

SEQ ID NO: 3545 - DNA, 118 bp, Homo sapiens
  misc_feature (1)...(118): n = A,T,C or G
tgggcggtggtcttggccaacgacatgntcanacctgcacgagcnctcgaaagctgaactggcagcccctcagctcattntgttagccaacttggccntgacgggggaggcaagcggt

SEQ ID NO: 3546 - DNA, 379 bp, Homo sapiens
  misc_feature (1)...(379): n = A,T,C or G
actgaggctccagctccagaggtcagtgaaggaggaagacacgggagcaagactaccctgaagggctcaccnggggactaaaccctggaaacaangganctnnccnnacnttcgtaanagactnnggntataattntatggncctanctgtancttngggctanagaggtgnccaacaggccatngagncccatctgctgaaactccttnnnaacatgagggagtgaggagactnggnaaacgccctctgccctccctnactcctnggtccttaatgatagttttgtttanatataaatttttatantttngtntgggtatacatttttatctcaagggcaatatttgctggggtttancgagttttaataaatattcc

SEQ ID NO: 3547 - DNA, 299 bp, Homo sapiens
  misc_feature (1)...(299): n = A,T,C or G
gaagaagacctaggagagggtgagaagtccaccctgaagcacgcatcaactngttcgttctaaggagggaatgctttcttcgccaagacatcangaaaagactggggcacccaanagaccagctngactgtccgcatggtattaaggattgtgggangggaggcgtggaagcgnacttctggctagacaaagggtggagctgggagtgtccggagacagaatcatccacagttgtaaaggttttattagttatctttgccttctgatgcaatgaacgcacgtaagccattccatccttt

SEQ ID NO: 3548 - DNA, 409 bp, Homo sapiens
  misc_feature (1)...(409): n = A,T,C or G
aaggacttggaaagatcaaaacctgntgtccagcatttgggaacacttgggactctggaaaggtggccactgaaaagcaccacaggtcttaatggctccccggaatcttcttagcactgagaagctcaagctatggacactcctttcagacaggcttgcgactgtgatgtcatggatcttctgcctccagatcctgatctcagttttgagtgcagtgtatgcttttgcacatgactttagggcagatagggatgcaaggtggagtttttgtcttttgaggattcaggctttacctctagatattagtgtggttaagatttgaaaatctatagtaagacaatattactttggggaaaccatcacatggaaataaaggctcccattctcgtggtatgtgtaaaaaaaaaaa

SEQ ID NO: 3549 - DNA, 305 bp, Homo sapiens
  misc_feature (1)...(305): n = A,T,C or G
ccatgaagagcagctggaagagggtgattactatcaagtggcatattattattacacagtgacccctaattatgntgacttnngggaaancttnactgntgattactncgngtttgnggnncaggataggtngaacaggttgnntatngaggtaacaacnacngaagcggntnagactacngccngtttntncagtnttgntacngaacttatggaccctcaaaatcctgnaaccacgaaaccagggaccacagaaccagngaccacagaaccagtgaccacagaaccagtgagtcaaatgggga

SEQ ID NO: 3550 - DNA, 240 bp, Homo sapiens
  misc_feature (1)...(240): n = A,T,C or G
ctgcctggggaagtaagacttcaacgaaaacctgatgcgacctctcctgattgctccgggccgattcatttcccagntggggtgtagacgaaagcctcctgcctccccacaaagcaagatctgcctcaccatggctcgtccaagttcaaatatggnagactttcggaagngtnttgcgaacgccnngcacatagccatcatctcgggggctggctgttagtgcggagagggggggggaca

SEQ ID NO: 3551 - DNA, 293 bp, Homo sapiens
  misc_feature (1)...(293): n = A,T,C or G
ttacctttgctctgtgtgtgancaanggnccggctcggcatggcaaggcacggcncagnnaggnanggnacagcacggccatggcacaaggggcagtnaactcctggagcccctacttaaagggcaagcttctgaggactccggaantcanttgagagtggggccagatnagangacntangtggataaaggcaatttnctngccaaacccgnatgactttgagggntggatnccccttggggacctacatggtgggaggaanagaaactgactccccacaagctagtccttt

SEQ ID NO: 3552 - DNA, 264 bp, Homo sapiens
  misc_feature (1)...(264): n = A,T,C or G
aaccccggtggtttcaaaagccnggctggcttcggtctctttggtggttctcgcttgccggggtctttgggcaaccttggggaaaaaagcccacccgatattgcctactgagggtctaggaaatgctcagcaaattccaccaccgcaaccacactacctaacctgctgcatccgacccatggccatattttcattgctttaaagaagcttttattcttggatttggtacgcgattaaaaatatttctaatgctaaaaaaaaaaa

SEQ ID NO: 3553 - DNA, 472 bp, Homo sapiens
ctgaggcttgcttccgaacaccatcttcttcccctcggagacccaatggagaagggctgcagatccaggaggctgcacaagctgcagttagcctaagcgccaccaggggcgcgcctgcctatcgtgatccgcgcctccggacagcactgcttcaggctccagtggtccagggaaaactgtacgcgggtgggacagaagctatccggacctgcaggaaacaagagcagggacccacgtgtacagaggctgcagctgtaaatgcgacgtcttctgcggcgcctggtatccataggagtcaaagccaccgatgaagtcaactgaggaagagaaggggaatactttgctcacataacaggcaaacacgaagccgaacagctaagagagcggataacaatcagagagagagaagttgtccctgtcccctctacccacccaactcaatgcctgtccaaagcaaacatttaacaccttc

SEQ ID NO: 3554 - DNA, 103 bp, Homo sapiens
  misc_feature (1)...(103): n = A,T,C or G
tggggagcgtggattcttctacacacccatgtcccgccgcgaagtggaggacccacaagcctacnacacagcagtnacccnaggatgagcaggaaaaactttt

SEQ ID NO: 3555 - DNA, 131 bp, Homo sapiens
  misc_feature (1)...(131): n = A,T,C or G
cctgtggagccacacactgngcacctttctactggaccagnagattattcccccgggaatctgggntncnntnccnnttgcttcataactgagtgtcngcaacatgtaaaattggagctttgatcagcaaa

SEQ ID NO: 3556 - DNA, 188 bp, Homo sapiens
ctgttcaccccgcttcaaggaagacaacaaaaggatggaggaaaacacagatgcagttgacgagctggggaggtacaactagctgcttgtacattcctttagttaaaacaagctggggtggggtgttatgggatggctacagtagctgagtcctattaaaccgataagaagaaacccaaaaaaaaaaa

SEQ ID NO: 3557 - DNA, 116 bp, Homo sapiens
  misc_feature (1)...(116): n = A,T,C or G
gaactgaggaaattccttcacaaggaggagnatgaagaagaaatctgtatataatcagaatgtgggtgatcaggagtgtgacgacatggaaggtgatganaacagccatactgccg

SEQ ID NO: 3558 - DNA, 412 bp, Homo sapiens
  misc_feature (1)...(412): n = A,T,C or G
acactgagggctacagncntngtttcgcggtcgcggcctgcnntgngaggangtagctgngccgccagggntngcgggattnngnatggtgacggaggacannggagagggnntganngggaaactgaanttctcccagacncgtntgacaagacaccgangcncaggagccgntggagcgntactttcaccnccttatcngggccaccngcnatttcanccatttnaccttgtggggtctggaaacggncccgggtccaaatgcccaaagtgcatanggccctaagttggcccancctctcaacancgattcacgcccaggtccctgaggactgagaaccagatcatgagaatgacagtcacagatcccttctcaccacttggagcgactgtttctattcccaataaatga

SEQ ID NO: 3559 - DNA, 384 bp, Homo sapiens
  misc_feature (1)...(384): n = A,T,C or G
agatcttctcacagaaaatgtgccgtactgngatgcgccaacccatgaancaggtaaagcttccaggataaacccatctctgctccttcccactttaaatacatacctggcaacggtcctggacatgcacatgtttctntntgaagcgcacgttgcanatgagcgacaggctgagggctacagaggagatagacatgcctttcactgacatgggcaactgaaggcctggggaggcaggacgctcctctctttccctttggtaggtcttttggtcttccaaagctgtttgccaatgaagcaccttaccaaattggtgacttttcatctcatgggacatacatagctaaatataaaatgctacattaaattgatgtttaatcccca

SEQ ID NO: 3560 - DNA, 414 bp, Homo sapiens
ctgagtatatgtagcctgagcaactctcaggagaaagcgacggaaggaggagcctcgacgagcctggggacaagaggtctacaaatttcatgactgccgtagaaccagctgctcatattaaaaccatgaatttccccagaaccaagggtgaaagccaagcccaacaagggcggtacttagcaaaatccataggtcaccataggtgggtccctgtagacaagtggctgtcacctgcccaattagcaaggctaaagaggggaagggaaaactgctggagactctggacaaaaagtagtacaggaagagattatcagcataaacaggcattaaataggaaaccgtcactctctgactttttatggacacacccttcttgtttaggaaacagaagaggatgagagtcatctgtgatca

SEQ ID NO: 3561 - DNA, 247 bp, Homo sapiens
aagatctgggacatgagtgacgaggagactgtctgaagcaagcaaccacagctcaggagtacctggccctcagcgcaggactggaccgcaggactggtgatctgggccctgccacctccctggtcctgatctccacatctccaaggacgagggtgtaccctctgccacccagttgcaccctttcctgtgccatctcaccagctctgaactcaataataaccttggcattgccactgaaaaaaaaaaa

SEQ ID NO: 3562 - DNA, 198 bp, Homo sapiens
  misc_feature (1)...(198): n = A,T,C or G
aggaactcgaagaagccatgatcgggagagctgcgagcgctgtataggactcagcttcatccagcancaacgcgcattgaaactcgagcgggctaaggcgctacggaaagtccgtagagtcaaaaagattttgaacgcgaatctctcctcccacctacacatcttcaagaagtgagttactgggatactgccgccccc

SEQ ID NO: 3563 - DNA, 109 bp, Homo sapiens
  misc_feature (1)...(109): n = A,T,C or G
aagactttgcgttactncccgtgatnccaggacgaacacgttgaatggacctttttaaaaagaaagcggaaggaaaactaaggatgatcgtcttgcccaggtgtcgtga

SEQ ID NO: 3564 - DNA, 228 bp, Homo sapiens
  misc_feature (1)...(228): n = A,T,C or G
atttttgggccggagatgcccattgngcgtnttgnaanctngtatgangtcantaaatgtatcaaccancgctagaagccnctggcactctatgcgtactcnancaatgacnaggcgatcnagaggatgatcncagagacatcaancggtggatgtgacaccaatggacggcattgtcacatcactgtgcccactttgccctttgggggtgtggggaacagcggcatg

SEQ ID NO: 3565 - DNA, 369 bp, Homo sapiens
gtgattccctggactctgtgagctggcagtgcttggagctacacagcttgtgccatggactctgaggtcagcaacggttccggcctgggggccaagcacatcacagacctgctggtgttcggctttctccaaagctctggctgtactcgccaagagctggaggtgctgggtcgggaactgcctgtgcaagcttactgggaggcagacctcgaagacgagctgcagacagacggcagccaggccagccgctccttcaaccaaggaagaatagagccagttctttcctgcaactatcaagtcattcagaaaagaggagtcaagagaggggatgaggtacatttgaaataaaaaactataatgaaaaaaaaa

SEQ ID NO: 3566 - DNA, 403 bp, Homo sapiens
gtctgagagcaccagggcctcagtccctgtaaaatgggttgccattccagcaagggcaccgaggtggtagaggagtcccggaaacctggagatcacgccgatggaggagagccgaaggtggagtctggcaccgaggctgcggatgacaaggatgcctcaacgaaggacggaacccctgagctgaagaactgaccctctttcttgggtggaccctcaacttgtccctggaactgcctttgacctgtgaggccccaccctgaagagctatccatggaggacagaaagagccctggttaggatgtgaccttcacggggcttgctctctggctttgggggagatgaagggttaagcttgaagtgctcagtaaagaggacaaaggactgcttcattcctcttggggcc

SEQ ID NO: 3567 - DNA, 312 bp, Homo sapiens
  misc_feature (1)...(312): n = A,T,C or G
acttggtagcatctttcacagctggaagcatacttnaaggtggaaccatacccanacctccangatcgaaagatnatggccaccanactgaaactganagaggaacaagttgaggcttggntnatccagagatncttggaggaggagatgcggacccccttggccaggctgnagnngncngncntggatggtacctcttctccttnccacaaagccctgtgctgnaggccaccaagctggaagnacnggctcattcncatnaatnccnntgagtccttgaccagntgcttaaaggatagcaaaactgtatta

SEQ ID NO: 3568 - DNA, 512 bp, Homo sapiens
  misc_feature (1)...(512): n = A,T,C or G
gggcccctctgtctgtctgcaaggaagagatggggggcgcagaagacaggaccttcccacgggagcagaacgacttcaataatgctgtcctcaaaacaggtcctgttcaccggaagtccatctgccagccatagggaagacaaaagctaactgggagccctgatgtcctatagtcacccagactggagggaagatgacagcagggctcccatacagagaggaggtgaaaaactcaaacctttggacagcagcctgacctgagtccaatcaagttgtgagggacagaggaggaggcctcagagtaacagggggctccatgttctttatagcaatcttagacgaagctgggattcaaatccccagagtagagggaggaaatgtgtcaggggtagggggtggtgagnngangctnnnngganaaacnnctanctgantgaaacctnctttgccnattcatatttntcctgctggntcccanngacttgccttggantatcacctgtctcactgaa

SEQ ID NO: 3569 - DNA, 246 bp, Homo sapiens
  misc_feature (1)...(246): n = A,T,C or G
atgaaagcaggcgtgtagttgccggcatgcgtgcacatgatgacgtaatcangntctgtatcanaagctcaccagatgctncagcgcacacgacagccacggtcccaacacccagcactgccacttgctcctctccagttctgtcgggatgccacacgcactgcccggccttttaagatctgaccggtagcgcggcgcgtcagcctcggggcgggccgcattctttgcgtccagccccctttcacg

SEQ ID NO: 3570 - DNA, 420 bp, Homo sapiens
  misc_feature (1)...(420): n = A,T,C or G
gtctctgatgggcctagagtttggagcgagaactgggaagcagagctctagaagcatggagaccataagtgaccatggtcactgtctcttcaccccatgtctgcactttttatgtacctggcttcaaatactttagtttctacttctggttgacctactgagaggagggcataggaaatgaaggactgtgtgtgccctcaagatggcggggctcctgacttggagaagaggaagaggtctatgctgcacgcattggtttatacaagaagtatttggttgcagtactcctacagaacagcactccatgccctgtgacagtgtgcttgtgtgagctttccagtgacattcatggtcagccatagtaaacagcctagaaaatgagaatattaaaagangngatnaaaatcttccattagggtt

SEQ ID NO: 3571 - DNA, 356 bp, Homo sapiens
ctttgggtaggtctgcggacttgcttgggctggacccaacgcagctcacagatgcactgacccagagatccatgatcctcaggggagaagagatcctgacgcctctcagtgtccagcaggccgtagatagcagagactcattggccatggcactttatgctcgctgctttgagtgggtgatcaagaagatcaacagccggatcaaaggcaaagacgacttcaaatccatcggcatccttgacatcttcggatttgaaaacttcgaggttaaccactttgagcagttcaatatcaactatgcaaatgaaaagcttcaggaatacttcaacaaacacattttttcctaaaaaaaaaaa

SEQ ID NO: 3572 - DNA, 404 bp, Homo sapiens
gactgaggtttccttacaaatttgaagtacaacagatgttagaagaacctcagtgggaattagtgtttgaaaagacaagatggataatcgaaaaatacaggctttctaatagcagcgtccccatggatagaatctttcgccgggattccgacctaacttgtctgcagaaacttttggagtgtctaaggaaaacactgagcaaagtagccaattgcttcatcgctgaggagttcttgactcaaatagaaaatctgttcctttccaattacaaaagcaaggaagagaatggactggcagaagaggatagtacaaaggaattgttcatgtaattattttaaagtaagatgttctaatcttggcatgctactgtaaataattgagattttaaagcaatataaaaaaaa

SEQ ID NO: 3573 - DNA, 184 bp, Homo sapiens
ggccagttcctgatcccagcagcatggcgtcttgggctgagccctctgagcctgctgccctgcgacttcctggggccccactgctggagggctttgaggtgctcgatggggttgatgatgcagaggaggaagatgacctaagtgggctgccaccactagaggacatgggacagcctacagtgga

SEQ ID NO: 3574 - DNA, 107 bp, Homo sapiens
  misc_feature (1)...(107): n = A,T,C or G
tgtctggatcactatacgggagatgctgccangngccccagacgggatcaagactccaatgacaaccataagattccctaaagctaagacactgccaaaaaaaaaaa

SEQ ID NO: 3575 - DNA, 192 bp, Homo sapiens
  misc_feature (1)...(192): n = A,T,C or G
tttccagggcttttttgntccaccggaganagcaccacaggttgcccctggagcactgtgacccccagaacaactgagcacttgacctccttatctctagtgtccgtcctgaacgaaatctacgtgagatgccaggacttggaaggngggacttgatctntgaagactcttgggacttgatctcttgaggac

SEQ ID NO: 3576 - DNA, 131 bp, Homo sapiens
  misc_feature (1)...(131): n = A,T,C or G
acaggatcagaggcactaccantgcanagcaccttcactgcatgtctatgggagtggcaagggttttcctcttacacagcctttaaggtgacattatacaaataaattcctttacactgttacacttcaaa

SEQ ID NO: 3577 - DNA, 258 bp, Homo sapiens
  misc_feature (1)...(258): n = A,T,C or G
tcctcggtgacagatncgacgacgcaccgcgtctcccaccccgcgccgccncgatgcccaagaggaaggttagcgcggatggagcggccaangcggagccnaancgccgatccnngaggctgtnggncaagcccgcccctgncaaggtggacgcgaagccaaaaaaggcctttggaaaggnttaagcatnatacnaaaaagngcctttttatttgnantaggggtagctgaagggctaaacnggcttgacgttggttt

SEQ ID NO: 3578 - DNA, 383 bp, Homo sapiens
  misc_feature (1)...(383): n = A,T,C or G
ctgggtggtggcccaggaaaaggaaattatcttcttcttctgaggaggatgacgttaatgatgatcaagtctgtaaaacagccgcgaggggaccgtgtaantgacnttgnanttgttgcatnaganttnnactatnntgggtgnggggntagcttaccctagccctanccctaccctaaccctanccagtatgntgaatgtgggntncaaangttaagaacactggtttctntttcnaaagacttaggttcatttccaaccatggntgntcacaaacctcagtnactntactnccnaaggatctaatgncttntggcttcagtaggcactgcaactgtatgcntgtggtacatccatgcaggttaaaaactcactataaacct

SEQ ID NO: 3579 - DNA, 476 bp, Homo sapiens
  misc_feature (1)...(476): n = A,T,C or G
ttcttctacacaccctgtcccgccgcgagtggaggacccacaagattctctctgatcaatacctgacacaggatgtgctggaaaagnccgatcatctgatggctgcagccaaaggtctgnttgctgatgntcctcgtnagcgcacagggtttccaaatgtaacaagggctccagattcctcacagagccanactggaataaatcaagaccctgtcacccagtctatccttaatgaatcaatcatagagcctcaggctcttaatgaagtcgacgatgcaggggagcagagcactgctcacagccagtcagaagacagcgagaatgaattgcctaactccctcagccagcattctaacaggagtacagagaggtttcttcaccaactaaaggaagagaattccgagttaatcaatcaactgtggaccgatattcagcagaaaatcgctacccagtcacaaagaactcctccaggatct

SEQ ID NO: 3580 - DNA, 225 bp, Homo sapiens
  misc_feature (1)...(225): n = A,T,C or G
tggggagcgtggattctttctncacaccctgtcccgccgcgaagtggaggacccccaagaaagangnagaagaagaagatagangncnacggagatgganacgatgacgaatnntgaagnagtggaatctcagtcaggactcctcccntgggctcctctctatttctgngnttcncccccctcatcccctctnngttgttccttctgacgtgtcagtatcctctc

SEQ ID NO: 3581 - DNA, 375 bp, Homo sapiens
  misc_feature (1)...(375): n = A,T,C or G
gagccgtggattcttctcacacccatgtcccgccgcgaagtggaggacccacaagtgcccccctnggggcctaggaggcggngaggagatcaaggaaaggntgaananntggntgtgccncngangatttcacangacagnntgttcttgcgggatncacnctaatganntnancttttgnatgcctgtgnacaaaatgataantaancccaccgatcngcttcctgntgcattctggnnggtnttggcttagccnntcagggtcaccgtgttatccagaaatggcagccactggctacgcgtgacgggtcaaatgtacatgtaagtaccaatgaatgaaataaagacgacgttcctggttcatccgggccacat

SEQ ID NO: 3582 - DNA, 134 bp, Homo sapiens
  misc_feature (1)...(134): n = A,T,C or G
aactgaggtggggtctttcangagcccannagcccggcgaggatcgcgcttggtcgcctttcaccccngnagnggangccatggtgcaagnagggtnccagaanagatcatacactcactgcttgcctggacaa

SEQ ID NO: 3583 - DNA, 314 bp, Homo sapiens
aactgagttcgtcggctgactggatcatcctgaacatggagactctagatccatttatgtcataccagccccttccatttatgcacgagaggcctgatcctgccccttctctatcttgtcccttctctatcatcgcctggagatggagcctgaatgattttatttactttgtggtgtccaatctctacctccccctaccgactggagactctttgaaagggctttattgtacatattgcttatttataacctagtttttctcatctccccagagacatctataaaggttcttattttgctcaaccaaaaaaaaa

SEQ ID NO: 3584 - DNA, 480 bp, Homo sapiens
  misc_feature (1)...(480): n = A,T,C or G
aagggagaggaccctaccgnatctacaanccagggggcagcacgcctctgggagaggtgtccnnatnttttgaacgtctanccggaggngaatactcaggctgaagggacccaactcatgtgcatgtgccgtttttgcttcaagctcantagcaggacctgccccgagcccnctgctccttgcccctctgtgaggagttacggagagggctttgtctctagagcagaagagaatgatgggacggcctgatgctgtcatgctctccactgcacctgtggcagcctcctgagagccaccaagatctgggatgaaggccacaccagccatgtctgctgaagggccccagactgagatgactccggcctccacagttagatgtttatggtgccagaggtctatattaaaggtagctgtctgttgctaggcagcccgtttgcacaaatcttgnacataaatccaacttgaagatcaaaaaaaaaa

SEQ ID NO: 3585 - DNA, 122 bp, Homo sapiens
tgaggtctgggcccgaagcttctgcctgttccctggcttctatgtgggtccaaaagatgtgtgtcctccatattcaaggctgcagacctccagattcagatgaccaaagaacaagaaaaaaa

SEQ ID NO: 3586 - DNA, 277 bp, Homo sapiens
gactgagctggaagtgaaacgggctccgagcagggcagggagccctcagacagagccagcgaggaaaatgaagctcccaatcttcatagcagatgcgttcactgcgacagctttccggggcaatcctgccgcagtctgcctcctggagcgcacattggatgaagatgctcatcaggacattgcaagggaaatgaacctctctgaaaccgcttttgtccgcaaactgcaaccaactgatgacttcacacaaagtaaattatacatttaaaaaaaaaaa

SEQ ID NO: 3587 - DNA, 107 bp, Homo sapiens
  misc_feature (1)...(107): n = A,T,C or G
aacgcctgtgggccccttgttctgacanatcaaatcgnggngnggggctgnngnacaaatctacccatctctnttnataaattgactatgccaataaattaacatgg

SEQ ID NO: 3588 - DNA, 290 bp, Homo sapiens
  misc_feature (1)...(290): n = A,T,C or G
agtcaaaagaagcctgggacatccgtgaacaacacgagtgaagcctgggacatccgtgaacgacagagtgaagcctgggacattgtgaacgacagagtgaagcctgggacatcgtgaacgacagagtgcttgcctaacattcctgtacaaggttctgggtttgaacccagcaacaaaagcaaaacaaaaccaaaaatcttggaaaatagtgtatcgatgcaaggatttgggggcgctactgtagaaacacaaccaaccaggtggggggggngaatgaataaatttgactt

SEQ ID NO: 3589 - DNA, 488 bp, Homo sapiens
  misc_feature (1)...(488): n = A,T,C or G
cccaccgcataggataaatctcatggnatntgttttttgtgactttgnngttncnggngccgnaacnaatcattgtnatcagttactccaaaattttacagatcacgaaagcatcgcgnaagaggcttacgctgagcttggcatactctgagagccaccagatccgagtgtcccaacaagactaccnactcttccgcacnctcttcctggnnatggtttccttcttcatcatgtggaannccatcatcatcaccatcctcctcatcttgatccaaaacttccggcaggacctggtcatctnnccatcccttttcttctngntggtggccttcacgtttgccaactctgccctaaacccccatactgtacaacatgtcccttgttcaccaaccnaatgggaagaaaattttttttgctgccttctttttttccagaaaaaggnancccattttttacaaaacacgnctntcangccaaaataaaccttt

SEQ ID NO: 3590 - DNA, 371 bp, Homo sapiens
  misc_feature (1)...(371): n = A,T,C or G
ccttgcccgggtctttnagacagcacattcatcctgcntnactngtgnacgttagatgactaccanancnttnctnnttgtcantgtacgctaaantcctntgggggngcctggtcggcccgtctctcatccngtcatcntgnccatggcaagattctgaagggattatcggcaaaaaaagtgtgattgcagcatctgaaccctcntnctaattgccgcgccttaagattccagcatcaccagcatcacctctcttttcttcagtgtcattcataaaaggctgtnaggtgcatacacctaacactttctccttattgacccattctgagtcnatttactgaaatgtacttcngaataaacaaaatgaatcc

SEQ ID NO: 3591 - DNA, 141 bp, Homo sapiens
  misc_feature (1)...(141): n = A,T,C or G
tgctacctgctgaganactgaacctgncttcctganaaattnctgagatagcggncaaccngtggacttgncgacctantgctnacagctctgacngactacngctaacaacttatcaacaaancatcaagaagcctgggg

SEQ ID NO: 3592 - DNA, 117 bp, Homo sapiens
  misc_feature (1)...(117): n = A,T,C or G
acctcgtgtgccacatttgcctccagcccctgctacagtcgctcganacgccctgcggacacacgttctngcacaagngcctacacaaacttcctgcaggngaaggatttctgcccg

SEQ ID NO: 3593 - DNA, 332 bp, Homo sapiens
  misc_feature (1)...(332): n = A,T,C or G
gtttccttttttgggcactgcntcttggtantgatctnacacttaaaatgccacctagcnattgcaggnccagggggngacacccccccagatggaggctggggncnnncancgttagtcaggagccttcatttctattggcttntactatgcatttcccaaatnccatcactgtcttntttaaagagatagaagttatattnagtgcaactnaccagngaantatcatgganancatctatcatgtttggctagcncatgtatgctggaggncctatcagcantatctnggttgaataaataccggaaangcnttcgagtcaataactcta

SEQ ID NO: 3594 - DNA, 332 bp, Homo sapiens
  misc_feature (1)...(332): n = A,T,C or G
cgtgctttggagcagcccagtacatggaaaaccacgcccccctgcgcgcgcagctcacctggcggaagtgagaggctcctcggcgcccggnagcgggagtcggtacttgagagagaagatgtccgggaagggccaggaagcngggggatgccagagcacctgcaggcgctgtcccgctgtgcgcaggcgcacgccttccggagggtccggcttgactggtgggagcaggaccggggtcagcgtccgctctgccggttcatacctcacacactaagtcttcgtttgngactctcattcattcacatgttcgctttcgccctcaaaaaaaaaaa

SEQ ID NO: 3595 - DNA, 333 bp, Homo sapiens
  misc_feature (1)...(333): n = A,T,C or G
gactgagaaataatgttcatatttggacccatgtcgaacttctctgaagaaagggcaacgatgattgcagccggggatttgcaggaatttgttccttttggccgagaccactgcaagcaccaccctaacgctctgaaccttcagcttcgtcagctgcagccagcctctgagttatggtcttctgatggtgcagctggcttggtgggatctcttcaggaggttacaatccatgagaaacagaaggtttnattaanattctcatcatacttttgaaatttagaatgaataccgtgctaatataaagctgcctatatgcatgtgagaaaaaaaaaa

SEQ ID NO: 3596 - DNA, 161 bp, Homo sapiens
gagcgtggattcttctcacacccatgtcccgccgcgagtggaggacccacaaggctctccttggacattcctgtactctttgtaggctccacatcaggttgcaactcagaactattgtgaacttcaagaaataggaagatccaagtgagacccacaaaggg

SEQ ID NO: 3597 - DNA, 454 bp, Homo sapiens
  misc_feature (1)...(454): n = A,T,C or G
ggccttatcatttctgttgngnctcnctgnnnctccttnnacattcccagctnagatcccacccctgtagtcttctgcaacagctgtgtgccggctcgaaagcgctggacatcggtgacgctgtggtgtggagctggccaattagcctcccctcggcgggtgaggatttccacggtattggtccagaagtgtcagtgccgcccgaagctgtgagctgagcatcctagaggaatgcgcaggacatgaatgaaccttggcaagaagcaggagacgcaatagaaagacgtgacctgaatgatgtgcatcgggtcaagagagcagaattggacagggccagaatactagacatggtcccccagtcatgggtttaagaccactaatagtcatagaatgtggggctagggtataactcagtgggagaagggctttgcctagcatgcatgaagccctgggg

SEQ ID NO: 3598 - DNA, 445 bp, Homo sapiens
  misc_feature (1)...(445): n = A,T,C or G
gagccgtggattcttctcacacccatgtcccgccgngaagtggaggacccacaagntgcacaggangccttnngggcttngntggtntctgcncgcatgtngnatatntatactggacacagagacntacatatcntcagannntngttctnananagctacntgttnatntatnacttgattnngannncntgggctcaaagggacacancntcccttggttttactctggaagactncggaagattcnacngatgtcngtccncagaagatttgaccaccnngccatgctgctntgaatgctacaagggataaagtccaaagccaaagaggctagagggccaagtctgcntaaaatcctanatgaagcactgggggccgtggtcgctgagaggagtcaggtggnggctgaggacatccggcttggagagaccctgtcagagcg

SEQ ID NO: 3599 - DNA, 330 bp, Homo sapiens
cgtggattcttctcacacccatgtcccgccgcgaagtggaggacccacaagggtctgcttagttggacttcccaagactgtgtgtggagctggagatttaatcaaaaggccttaagatgagtgccttgtcagagcacaaacattccgcagtcccaaggaaaatacaatttaatgcatccagttaaattgcctgagaggaaatagtgaatacagctttcttcaagtctttccccctcaggccattcactaagaaactggtcaccaactgctggtttcttaccctgttttctcacctaaagaatgctaatgagcttgagctcgagtcctcaa

SEQ ID NO: 3600 - DNA, 311 bp, Homo sapiens
  misc_feature (1)...(311): n = A,T,C or G
ttcttctcacacccatgtcccgccgtgaagtggaggacccacaagaggngcaactggtagctgggtnggaggcccggcancangngaccttaacaccttgacnctgnaggtggcccagnnnaancntggtattgtanatnaggtgctggaccancatctgctncctctaccagntggagaactactgttntagacccancantacccngcctacccctctgccttgaataaaacntttgaatgagcagaaangaanantataacggggtcacngtccttaccantnctgagtaccctgccgctgtactgct

SEQ ID NO: 3601 - DNA, 134 bp, Homo sapiens
  misc_feature (1)...(134): n = A,T,C or G
acttactataacccatggnagggtgccgtgtgtgctgctgcgggctntgagtgntgccangnagacnnagngctctcttttgccgtttttaaagngaaacatctgatcagcgctcagatcaccatctaccactg

SEQ ID NO: 3602 - DNA, 279 bp, Homo sapiens
tgagagatggcctcagaagtcgagggaacaaatccctgtgcgtgaggagttctttctctgtggtggagttgaaaccaagatcataaaatgtgggccctggactaacctctttgagaaacaagacgtcagcaagccaaaacagcttatcttcatcattcccggtaagtcgaaaagtcacaggttctcaaaacctctggttccagagtgactgccggtaaactggagaatcacaaataaaattaccactacgaatgatggtcacggttactaaaaaaaaaa

SEQ ID NO: 3603 - DNA, 239 bp, Homo sapiens
  misc_feature (1)...(239): n = A,T,C or G
gactgaggagacctctgaanagggntacagacacagtctttgagaacttctgctgaacccatggaggatggatgtcccnaggaagagaagcgggggctcattgtcccttccatctactctgccctttgcatctctcctacccaacccttcgtctgcatgcctcagtactactcaggcctgaggacctgagtcagtttccaggctcatgtaaggctttggcttcaataaaacaaaataaa

SEQ ID NO: 3604 - DNA, 470 bp, Homo sapiens
  misc_feature (1)...(470): n = A,T,C or G
gggagtgtatggggctccntacccaagggaaggagacggctggggctcangaagtgaatgaggatgagaacacaagcacagaggagcctgtggatcaggnangcccatcacncggacnccanggagccttattatgggcatagntctgngctaangnctgngctccnnngcacagtcttnntggcggntnancgaganntanatctgaangcctggcttcctgtttcccttgtgaggcgttcanatatncagtantctnctttcctggttggggacctntggcagnccatgcaanttgngcacacacatagctatgtatgtctccaaacatccaccagagggcaggngatacagttnaagaggccttgtctgcacaacaccngcctggncctgaagctgtagccccaacctccgcccatgctcctccatcttaagagctgggagctncagatacaaactgggggacaact

SEQ ID NO: 3605 - DNA, 170 bp, Homo sapiens
gactgaggtccccctgctcagccagatctgctcaccagtgaatcaactaagaaccctggatggtgaagagagaggagactatagtaaagaatccaggtatgttagaggaactgaacaaggggtgaggtggcccttaagtgacaataaaaagagaatgtgaaaaaaaaaaa

SEQ ID NO: 3606 - DNA, 329 bp, Homo sapiens
  misc_feature (1)...(329): n = A,T,C or G
gactgaggagaactatgatcagatgaaagctttagtgagtcaacttcatgagcgagcccagtatgtgagactaggagggagtganaaggnccgggcgcggctcacatnctaaggaaanctgntccncacagacanaatcgactntctnatanacccaggntgggtctagcgctttgtacctcagcgtgtcttctgtncccctggacagtccnattaacaaatgcttntaantttgggnttcttaaaaaaaaaagtgacttgatgaattgcacataagagcacaataaaagtggccataagggaaatgagttttttcagcacaaaaaaaa

SEQ ID NO: 3607 - DNA, 188 bp, Homo sapiens
  misc_feature (1)...(188): n = A,T,C or G
ctgagagcctctctcttctgacgacatgcccagctgtatcacaggaggagagtgttaagtcacnaacggcgatctccatgacgacggaggggagcggctaccaaaatgaccttccaaaggacggccacctctgaatgctgtgatacagtggtaacatgggaaaataaagtctagctattaggaatgaa

SEQ ID NO: 3608 - DNA, 358 bp, Homo sapiens
  misc_feature (1)...(358): n = A,T,C or G
tgtgttccttccaggntgacaaaacaacattggggtcctggtcaatatgatgaggtcacccgccacacaagagaaaggaaancggtcnacgnggncctatgcaggtagtccacatgctaggaacacctgaggcttccttttcagggatgtgccacanactagnggnaaagatttcttgnactaattgctcnaagaaaagcactcacagaaaagtaaatttaccccntccttaaaaggtttcatcacttcntatttattttagagacaaatacaaatctttcaaggatctttcttgagcanagagatatttctctnctcattttaactcttaatcctttgggactaggttaaagcatag

SEQ ID NO: 3609 - DNA, 579 bp, Homo sapiens
  misc_feature (1)...(579): n = A,T,C or G
cacacttttacactttacagactatnagaanagntagaggggcgaagtctaaaaatgaaactgcctctgaccttctgcaggctgcttagcaggttaaacagattttctgtaaaagcaagccctcctgtgagtttctccacttcctcttatttgtgtagccagaagaagaaaaactcttacgaagcagtagaccaagcgaagtactctcgtttagtacgctctgtcttgtccagaggcccggacnngactncnnagncgctgtncnaggnnnatgatggctgtatggaccagtgagtaagcataaggctgcagancccgagccacaggccggagtcccacaacactgctttcctatcttcaatgaagagagaaccgggaaaccacacacagatgcttcttcaagccctttgaagatccctttgcaaaggaactcgatacccagtgtgacccgcatccttcagcagaccatgccacctgaacagagcttctttttggagaggtggaaagagcggatggttctggagctgggagaagacgggtttgcagaatatactttcaagtaattatcttgcttctggg

SEQ ID NO: 3610 - DNA, 397 bp, Homo sapiens
  misc_feature (1)...(397): n = A,T,C or G
actgagtgacccatggagagtgttaatggctatttaatgaagtacaccaaccttgtcaccgggtggcagtacagggnttttgttttaaacaatgaagctgggctgttggagtactttgtaaatgaacagtctanaaatcagaaacccagagggactttgcagcttgcggggggccgtgatctctcccagccgatgangactcgcacaccttcacagtgaatgccgncagcggggagcagtataaactcaggagccacagatgctagaagagcgggcagcattgggaaatgtaaacactgaagaaagagtattgaactaaaaaagcagcaatctgcattcaggggnaaaaaattgggtttttttatgagggnanttttattggggggttgaaagaaat

SEQ ID NO: 3611 - DNA, 629 bp, Homo sapiens
  misc_feature (1)...(629): n = A,T,C or G
gatgacttgaaagtagggtggtcttcaccaggctaaaagaagtaatgatccataacagggtgcactgtggttctagatctgaatgagatcgcgttcatcaggacttcaggtttctgacaacactgttttgagtaatgtatatatggtctctgtaatgtagaggtacttcagttcagatggggaaagttgagtttgctttagaggattgcagaactgtgatgtaattccagagaatgcttgtcaagtccagctacgctttggcagatgaggcagtgagagagctcacccatggccactgagctgcatatctagctataatttttagagggactagatggtgtctgtggactacatgtggccggctacttgctaattaaaaagggatttcagacatctatgtggatggtagccatcttaggacagcttagaatgtttaggatattgctttttaaaagcaaagttttatataaaggttcctataatggcccagatagtaatattaatactgctttggnttgcactatgttgcttttgngtgaaaaatagtgaactttgggttttttgggtcatcaaataaatgactttggtatattncaataaaacctactggttaaccttaaaaaaaaaaa

SEQ ID NO: 3612 - DNA, 442 bp, Homo sapiens
  misc_feature (1)...(442): n = A,T,C or G
tgaggtcctgagccccatctcttgttagcacaaatgcctagaatcaacagacgacacaggacattgtaagatgctgtggaaagtgtaggctgttcagaaaaccacctagcagctcccaaaaggttcaacaacaacgacagaaggaagagccacataacccagggacttggacctccagcactcanaacccggcctagacccaaggctctctggataaggtccaggtaaactgcccggaggacacttctgttctccggaagctttcgatggaggcctcaggaaaaagcagacaagaaaacgctagcggctggcaacaaaggctatntnantnccaactatnggaatgttctactgnatnacttngnacnngngtctttcanatttgngcgaagagnntgtntctntttnctctnccttgaagacatacctgccccatgcataa

SEQ ID NO: 3613 - DNA, 496 bp, Homo sapiens
  misc_feature (1)...(496): n = A,T,C or G
aactgagcctgtgggccctggnagtacgtatttgatattggatgcgaacagcacggtgaatatcgcctcacagatacggaaagaggagaactaggaggaggaggaanagacattagtgaacatngttccnaaanggaaagntctcaacatcacagaattggccctgnggactccaaccctctccgaggagcagcctccccctgngggccaaggccaggaggaaccgcagggacttactggcgtgggtgacccctnanaagacatccaggcagaaggttttgagggcgagctggagccgaggggggccgatgaagacgtagacacgttcangcaggagagccaggagaacagctacganatagaccagggaaacttgaactttgatgaagaaccgtcagacctccangattaagatagtggnggcagaagaccananacacaccaggcgtgccttanttaacaccagtcagctagggctggtatccaccacctgatg

SEQ ID NO: 3614 - DNA, 610 bp, Homo sapiens
  misc_feature (1)...(610): n = A,T,C or G
gaaagggcattggatcccntgnagctggagtgacaggaagttgaagatncaggctattacggaccaccagctgtggattntggcaccaaactcaggtccttgggaagaacagaaatgttcttaaagactgggccatctctgcagccctgggttgttttgtgtctgtgaagcaagcatccgaccgaccgagctccatcctnagncacctncacgctgcttcctcctctcagcctcctgagcgcctgagttgcttccatgtgctggctgcaacaacgctgataaaaaatgagaaaggaaaatnanggcgngagnnctgtttccccctttttattattttaccttgtgtgatacaaggccttggaagcaggacctcatacttagctactcaacccactgagaaccatcccaagtcttccttttactctttgtttcctcagataggagctcactaagttgcctaggactggcctttaattaattttatagccaaacaagccgngactttacaatccttcagcttnggnctcccagtaactctattagagccctgcaccatcagacccagccttnctgncctcttttggntaaaggctgcaagtaaaaattgctg

SEQ ID NO: 3615 - DNA, 260 bp, Homo sapiens
  misc_feature (1)...(260): n = A,T,C or G
tgaaatgcctgagatctgcccctgccgagatctgaactgtcttcctgagagattcctgaataaactgccagcctggcagcctggaatgactccaggcaccaagagtggaactggcgacttactgctaacggctctggcggactagtgctaacaatgtggcaacaaaacatcaagaancctggcatggcaggggatgggcttcccccctttataacacagactgctantaaacattgaccttgaacagggaaaaaaaaaaa

SEQ ID NO: 3616 - DNA, 555 bp, Homo sapiens
  misc_feature (1)...(555): n = A,T,C or G
gtctggtgcatggagaagantttgagccctcgttctgtttttacaccggctacaaaatccccatatgcaaaaccctggaccagtattttgagttcatccagtctctgccatccctcgataacccagaagtctttgggcttcaccccaatgccgacatcacgtatcngagtaacacagcttccgacgttcttgaaaccatcaccaacattcaaccgaaanaaancggtggtggtgtgggcgagacgcgcgaggccattgtctacaggctgtctgaggacatgctcancaagctgccccctnactatgtgcctcatgaggtgaaagctcgcttgatgaaaatgggtcncctgaactcaangaacatatttcttagacaggaaattgacaggatgcagaaagtctctcaatcctccgcagcagcctgagtgacctaaaactggctatcgaagggacgatcatctgnagtgagaaattgaaaaatcnttgggaggggatgtttgatgcncgtntcctcngctttgggaaaaaaggtgttcctggggaatcccccccccc

SEQ ID NO: 3617 - DNA, 429 bp, Homo sapiens
  misc_feature (1)...(429): n = A,T,C or G
aagcagctcggcaatgatgtcatctcccaggatccttccagcccagtctcgtgcaacacagagcgtttagaaggaggggcgacagtgcctaaactgcaaccaggtcttccagaggcccgctttggttcgggaacaccagaaaagaatgccaaagctgaacccagagtggatggaggctgcaggtcccggagctcctccagcatgcccaccagcccaaagcccctccttcagtcccctaagcccagcccttcagcccggccttctatccctcagaagccaagaactgcctcccgacctgaagacaccccagactctccatctggtcctagttcccctaaagttgccctccttncacccatncttaaaaaangcttcttcggacaaggagcgtgacggccagaacagctcacagtccagtcctaggagctt

SEQ ID NO: 3618 - DNA, 276 bp, Homo sapiens
  misc_feature (1)...(276): n = A,T,C or G
tgtaggaaacaatagttttaatgatattatggaagcaaatttacccagcccttcaccaaagcccaccccttcaagtgatatgaccgtgcgtaaagagtncatcactgcaaagnatgtcgaccaccgcttctccaggaagacctgtgcctcttcctcagcaaagctgaacgaattgcttgaggccatcaagtccagggacttacttgcattaatccaagtctatgcagagggggtggagttaatggagccactgctggaacctgggcaggagctcgg

SEQ ID NO: 3619 - DNA, 432 bp, Homo sapiens
  misc_feature (1)...(432): n = A,T,C or G
aaggtttcctcccagagtcctctgattcatgcaggaaaaaatctgaggcaccatggaccgtccattcaactgaatgcttacggtgactggccctagagccatgtgcccttgacagggttcacagtacaaaagacaacgtggtttttcatcagggaccaaacaactacacgcgcccagtgtcacctgatactgtccactgcaccgccatcacaatgaattttccagaaactaatacaaaaaattgcttctttanacactntntttgngcttaacctcaataaccgtcgggagatggcaaattaacgcaatccaatttttaaatgatgccggggcacatggtcttcatccaccaggaagcacatctggatctccatcactactagcgaatcaccagaataaattctcggttccttcggcgccgtgcgcgacaca

SEQ ID NO: 3620 - DNA, 192 bp, Homo sapiens
  misc_feature (1)...(192): n = A,T,C or G
gactgagctttcagtccctggagatgttgaagcntttatgatggtgcatggccaaacttaagctatgcacctgaagccatagtttcttcctcaccanaagtgatggttcagtcgtgaggcagccctccagcaagacattgtaaaagtgtttcaattgtttaataaaaggtcaagtatctggaaaaaaaaaaa

SEQ ID NO: 3621 - DNA, 437 bp, Homo sapiens
gacgtacagaaggggctacaggaccgaggccagattcagagccagagccagcggccagttttcctgaatgcggtccaggctgtgtttcaggaagggccctgcgtctatgcagcgtctgacctgaggaaggctggaaaggcttcaggatactaagtcagctctgcccagagctgggatctggcccactacgaatgctgtgactcacatgggtgatgctgtatgcctaagcactccaggacctggatcccttgctgtgaggtcaacctgggactgaaaaagaacaaggatcagctcagcaggatgaatgactggagagagaaggactgacttgtccttgatcccatcccaacacctcctgtggccctgccttggttcttctagccttgccttggcctcatgcccaccctcttaaatggtgtacctgccagtccaagatt

SEQ ID NO: 3622 - DNA, 318 bp, Homo sapiens
  misc_feature (1)...(318): n = A,T,C or G
catgagtctgcactagtctgtatgtggcatttncaanacagcagatgcnagcaaggcaggcacataaagactcnggagagactnaggcatcaggcnccacctcccctngaggaactgataaacatccanannanncnatctnnctntctnccaccctctnanagcctgaatntgagcctgtggntgcttcaggccctatgcatagagctcggctggtgaantccaagaggaanaagcccaggggactcttcagnnaactctccatgtctcanccaccacnaagagagcaaaaccgcttnctagcatcacctggaagga

SEQ ID NO: 3623 - DNA, 330 bp, Homo sapiens
  misc_feature (1)...(330): n = A,T,C or G
tgcacggacagaggcttcctnacctgccccttntgtgcctactttagagccancatcatatgcanactctncaccggcgccagagaccccagcanaagaagatactgaaaatatggttcctgattgcatctgattgnacttttaattctatacccaggggatacaggggatataaaactggtaaatataaatctatatgtatcattgcctaccagaatgcaatttgaccaattgtataacttttncatgagtcatantgctntntctcattgtatgctaactnccttatgtaatgtnaccaatngcttgctcacagatcttgacataatg

SEQ ID NO: 3624 - DNA, 441 bp, Homo sapiens
ggctgcaggtgatgtgagccaggagccaaagagaagatcacgcccgactgtctgctatgcctgtgccctttacaccggagttgaaacctaaaagagcatcaacttcaaggaaaaccaagaccacaaatgtcgtggaagaaaacaaagatgcaagtaccataccaattcctgaaaccaagccagaagatgttaaagacgaatgcaacatggaaaatgctgaaaatggagaagccaagattatggaggcacccattcctaaaatggaagctgaggaagtaaaagaacagataaatgaagacactgaagaagatggaggagaaaagaaagaagcagtggcagcagaagccaaagatgatgagctaaaagcaaacattcaagatgtggagaaagatgaagatggaaaaagagcacaaagatacaggtgaggaggtggaagacgga

SEQ ID NO: 3625 - DNA, 125 bp, Homo sapiens
  misc_feature (1)...(125): n = A,T,C or G
ggcctcaggactcctttgctctgtcactctcangatcccagccctggctccccaaagtacctctacaccctccagctttgccttgacaaagaaatagggagtccaaagcaagtcaaaaaaaaaaa

SEQ ID NO: 3626 - DNA, 176 bp, Homo sapiens
  misc_feature (1)...(176): n = A,T,C or G
cagggcaaacgaggaccacatggcagaaaggagaactgaagaatccaaagccccagtgtacacacatctcttctgactnttccagcaaagacgggcctgtttttccactatgcccggatcagaacnganggtcatnagggtcanttccaacccactttcctcatgtgcaccctgcc

SEQ ID NO: 3627 - DNA, 329 bp, Homo sapiens
  misc_feature (1)...(329): n = A,T,C or G
acactctactctgatacttccaatttgcggttcttgctgaactctttggatcttggacatcngaagtgccncacgatatttgttttgtgggaaagaacatatgtagaagngtgactcgttatnagacctnaccctctgtnacattccatagtggtttttctatnactataatgnaccgtatnnggnatcaatcgagcgcatggcattggtgaaaagaatttnctnaaccttaanctgtgaacattcttattggaanancggcntnccaaacntatganctntgngcagntcactgttcttgngggttcccnagaaattggagtggtctg

SEQ ID NO: 3628 - DNA, 393 bp, Homo sapiens
ctctgtctggttcgtcactgtccgtccatctttggttccacgatgcctgtgctggagaagtagatgcagtctgtgtccagtccacgtgaactagcagcccactctgcactggccagtaaaccatgcccaagacaccatggaccacgaacctaatgcgcttgtttcaaccctacatgaggaccctgtctaggggaggctgggttctccagcaagaaggcggatcctccacaccagcccttgtgagctacatgaggagggagggcagacagcaggaacttccttgaggctggaaatggagcctaacaaatgagagatttcagcagtgagaagcctaattaagccacctgggtcttttggcccacccctaccccagtccattctgcccgtgggccc

SEQ ID NO: 3629 - DNA, 208 bp, Homo sapiens
  misc_feature (1)...(208): n = A,T,C or G
tactggctcacctgctgacttacactcagctgnacagcccaagactgcgtacctagtagatggtactgcccacggtggacagctgccctcctacctcaactaacaattaagacagtagcctcatggagatgcccatgtcttatttanngcaggtctcccattgaggttccatctttcaggtgacctctagggtctgttagagtgccta

SEQ ID NO: 3630 - DNA, 150 bp, Homo sapiens
  misc_feature (1)...(150): n = A,T,C or G
tttttgaagccggaaggtttggggggatccntttgtttggggtccatccgttcaaggttgggcttcccgttaaaacttttcacgttngacatcttcctcctcgggcgggtgggggaccaccggctngcctnttnttcggaaaaaaaaaaa

SEQ ID NO: 3631 - DNA, 133 bp, Homo sapiens
gagggctcctgcaccaggaaagaacaatcagaggtaaatgatgtgaggaggtggatggaggtacccaacacctgtcagtctccttaatcagcctgtatctatattaaagaccactccctgctaaaaaaaaaaa

SEQ ID NO: 3632 - DNA, 229 bp, Homo sapiens
  misc_feature (1)...(229): n = A,T,C or G
actgaaaaaggaaagaacaagaagaggaagaggaggaggaggaggaagaaaagctgcacttttcttcccagcactgcaaaggcagaggcagaaggatcctgagttcaaggccagtttaggctacataaaaagttatganctactctggnttacggagtaagananactnagncctccantatccntaccccccaaaaaaagcaggagcaaattctgatcaaaaaaaaaa

SEQ ID NO: 3633 - DNA, 187 bp, Homo sapiens
  misc_feature (1)...(187): n = A,T,C or G
cgaaaatcagatatccagagatcagaaaatgataacatctgaggatcgggtccaagaagggaaaaaagttgtgaaactcaaaacagaagtggctgataaagaaaatattgaaagtacagntganaaaaactgcattccattgnnagctggagaagtanccagctcagaaatacataattcaaaggat

SEQ ID NO: 3634 - DNA, 164 bp, Homo sapiens
actgagagaggatggctgcctttggcgaggttagaagcaccgcctggaagcccatcgctcgggaggtagagttaggagttcaaggtcatcctttgccacacagtgattctgaggccaccttgagctacgtgggaccctgtctcagaataagaccaaaaaaaaaa

SEQ ID NO: 3635 - DNA, 252 bp, Homo sapiens
  misc_feature (1)...(252): n = A,T,C or G
aggcccgctgaaattagtagccnaaaagaaggactcaggntntcantncggncttcaaaaaacaagcntntggggaactggagctggagggagctaagctggctggagatgatttgcatttaaagagaaagtagccctctttggattccctgggagcggagccggaggagagtacttccgttgatttaacagttcccctttcctacctcccacaagaactaaaggagcactgttagttaccgggaaaaaaaa

SEQ ID NO: 3636 - DNA, 252 bp, Homo sapiens
  misc_feature (1)...(252): n = A,T,C or G
ccctcgctaacctgagtgattctgnaactacacaagctgcatttgggagaaggagaagtgtctgggaaggggccccgaacagaggaagaanaacagacgganaccacggggaactgggaaggagcaagtgcggaggcnatcctgaagctgctgaggaaggaanatgggtgngctnncctcaagctcttttgctgcataantgcncggaaaatatgagaggatcctgaaagaattctctggcagagagcacat

SEQ ID NO: 3637 - DNA, 298 bp, Homo sapiens
  misc_feature (1)...(298): n = A,T,C or G
gttccaggctggtcacgggcagcttccctcantngatgaactatgatattgttgntacctgaaagaaaccctctnctccctaagttgttttttggtcanntacgctggnatagtttgattgtcaaccgtgangccgagctggagtcattggagaagtgggaaccccnagtnagaaaaatgtctccattantatcntngctaagggttgancnagccttngnggagcaantactngtnannnntcaagtaanctcccctccgtgncctctgtaacatncttccctgggtttcaaatctt

SEQ ID NO: 3638 - DNA, 230 bp, Homo sapiens
gagtcagaccctggaagcaattgaagacatgcatgagaagtccatggagggtttgatgaacatggagaccaacaactacgatatgctttttgatgtagatagtgaagagacattatgaagcatactctgaagtactcttctcctttcccatcttcagactaatgaagcatacatatttctcacttgctggtacattgtaaccaaataaaaaattcactaacaaaaaaaaa

SEQ ID NO: 3639 - DNA, 446 bp, Homo sapiens
agggaactttcaggagcctggccgccgcgggagaaagcttgtcgtggtggacttctctgctacgtggtgtggacttgcaaaatgatcaagcccttcttccattccctctgtgacaagtattccaatgtggtgttccttgaagtggatgtggatgactgccaggatgttgctgcagactgtgaagtcaaatgcatgccgaccttccagttttataaaaagggtcaaaaggtgggggagttctccggtgctaacaaggaaaagcttgaagcctctattactgaatatgcctaatcatgctctgaaaagtgtaaccagctaccagctgtttaaaacctgtaccttttttaatttgcaaaaaactatgaagtgtggagagtctatacccaactgccatctgattataaatgacaataaaatattaattctaccctttttaaaaaaaaaaa

SEQ ID NO: 3640 - DNA, 193 bp, Homo sapiens
tgagtgtacattttggaacgggaaaggaagacgaacacggatgccgggtgtcaggcagtcctggccgcgtgctgggctgcgctctgctgttgctgcctcctggacagcttggactgagtagccaagacccagttctctcgcagccgctgctcctgttgctgaataaacaactagtgttacacaagaaaaaaaa

SEQ ID NO: 3641 - DNA, 278 bp, Homo sapiens
agccaatcccagacctgctgtaccaccgatgtggaaaggcatttaaccttgctacacactcccctgcttcctgactagcttggttggcccactccctcacccacctccttttccctccatatgaagctgggaggggtggaattaccacagaaggagatcacccagagatgcttgtcagacactcaggcaaatctaaccgcagctccctaagggagacagcacccgagcttgaaggatcccttaacccagagctcaatggcaagcacgggggggggggc

SEQ ID NO: 3642 - DNA, 328 bp, Homo sapiens
  misc_feature (1)...(328): n = A,T,C or G
actgagcccgggtcttgcaggcagctgagcctgctgnccgcagttntntggaaacgtgtgagcggnggctgaagccccaccacctgctggaccctcagnatgaaggaanccctggnctggatcatggttcaccagaatggagtgcacagaggcttccagtcgctcttctccatctcccaggcaggaggacagatgcaggcaagctaccactgggccagggacctggctcccagacgccccctgctggacgtcctcctggcccctacttcggattcctgcccctaccgcaggcgtgagcaggtactgcgtgagatgccaggacttggaa

SEQ ID NO: 3643 - DNA, 321 bp, Homo sapiens
tcgagggagatgagaactcacctaccatctgaaagtcttaaggtttgctgacagacaaaaccgggctttgaatggagcgtgaactcctgaggcgagcattggcccgagagagccgaggatgcaggtgttggtctgatcttgatttcaggtacttttggaatacagaataccagatgtgttcctgctgcccagccccacaaggctatgcagaatgcaaagaagagttactttttggctggggagtagtggtatcatgtgcactattgctggaaataataaatattggcctatctgtagaaataaaaatctgactaatgataa

SEQ ID NO: 3644 - DNA, 285 bp, Homo sapiens
gcctcacatgagtcaccgtccatgctgccgtgtgggctcctgcctctggactttggctcattttccatgcctgagctagtctgtaccagatgctggcagtggggcatggcagagctcggtagagctgaattgattgcccaacccttcacctgtgccatctcttgacaattgttactggaaagcctgccctgtcatcctggctttcagttcttgtggctcttggatgaaagttctgctatcttgtgccccaccccattaaaggactgcctcccaccaaaaaaaaaa

SEQ ID NO: 3645 - DNA, 412 bp, Homo sapiens
gatcccgggaaccccaaaccacaaagggcaaagacagaagccgctgacccaccagctgagagtccgacccccacctccgacccctgaggctgagcaagacgaggctgagcagaagctggcctaacacacacctcagccatcatctgatttagtgatctaagaagagattcctcaaagagaagcggattcctcaaagctgtcctttaagtgtcacacacactgaggatagctgttgagaaggctgatctgactccatgacaggcttcacactggcagttcaggagacaaggcctaactctgtttccaagaactgagcaagtccaggcaagtcccaggcctcagaagctgccctggcctgaggcaaggacaacgggtcagcagcagtttccagacttcccagaaacagttttcc

SEQ ID NO: 3646 - DNA, 185 bp, Homo sapiens
  misc_feature (1)...(185): n = A,T,C or G
gggaccaaattcaacttggaaactccttcaggggaaactctgccatcattcaaggaggaaaatggcaattttcacaggattcagnatctttctcgtcttcccttaccttttacattaacatcacagttaattttgtgttttgattcttaaaggaataaagntaatggaaatggcaaaaaaaaaaa

SEQ ID NO: 3647 - DNA, 322 bp, Homo sapiens
  misc_feature (1)...(322): n = A,T,C or G
agctgcagacaggaggagcagcggacggtcaccaggntctacgtgccatgcattcacatgacnnccatcctcatatgctaaccagcttctttaagatgtatggagtgactcgcancggggccacgnanatgaggaactnncgaatggagaagaccacatnctngtgcatcnngnttcatcnccttcgggtncagctnaggcncgagaccctngatccggaacattgcancgtctctgcctccaaagcttgcaagcagcagcctgctctcctccagtggccgccctgcacccggaaccaataaataaatcttaaaaaaaaaaa

SEQ ID NO: 3648 - DNA, 387 bp, Homo sapiens
  misc_feature (1)...(387): n = A,T,C or G
agaatgacagaagatgctctgcgcctgaatcttttgaagaggagtttggacccagcagatgagcgagatgatgttctggcaaaacgactgaaaatggaggggcatgaggccatggaacggctgaaaatgttagcactgctcaaaaggaaagatttggcaaatcttgaggtgccgcatgagttacctactaagcaagatggcagtggtgtcaagggttatgaagagaaacttaatggaaatctcaggcctcatggagacaacaacaggactgctggaaggcccggcaaagaaaacatcaattgatgagcctgtggatattgagtgctagacgggaggtatgngaacagttttanctgcctttaanggatttgggtcgtcttaaaaagt

SEQ ID NO: 3649 - DNA, 160 bp, Homo sapiens
  misc_feature (1)...(160): n = A,T,C or G
ccccccccccagccaaagcagggcatgttccatgangacnggatcanctcanttgagggggcaaaaaaagggganccttggctggttnttatganaaaaacttctcgnatctggnccttganaaagaaaggcctttatagacaattgggggaacatacaa

SEQ ID NO: 3650 - DNA, 121 bp, Homo sapiens
  misc_feature (1)...(121): n = A,T,C or G
ttttcacatccctgaaaacgagnctcccttggagccaaagacttaagagaattggacacaaaaacccgcaaagangtggaatcaacagttngtgggccaagcaaaaacttgtccttcttgg

SEQ ID NO: 3651 - DNA, 384 bp, Homo sapiens
  misc_feature (1)...(384): n = A,T,C or G
tgctgtgacctgatagcggntcgngagcacatgggaagggaccccgccaggggcggtngccctcctcggcgctggccgncggtgctcaagcacagntcatcgtngccgcccganagcgcccaagtccaaggctaccgacttcaaccgnggccgtacattaccattgcngcttctggacgcctaccgcaccacccggcttccaggctaccaacttcgggcgcgcggtngcaaanaaagtcaacngcccatgattgnnaanaaactggaagccacctgggnctgnnnaatgaatatcattnacgncaaaccttgacttcaaangtcgccggcccaactttaacaaagcttggcnaccattttttccttntggggcttttttacctt

SEQ ID NO: 3652 - DNA, 620 bp, Homo sapiens
  misc_feature (1)...(620): n = A,T,C or G
ttggtgagccgagagggatcaggtgaggcaagtatggggcangctgttgaggagactttgggctctcactctcggggaggtgatggtcattcctggaactcctccccccacacccagcctttctccccatgagctcatcacctcttcatcctatcccaggtaccacggcccttaaggcagggcagccttgagctggatgtggctgcttgcaacttgtctgtgctgttttttaaaattgggacagggtctcatgtagcccaggttggtctncagctcactgtgtagccaagactggctgtggacttccgatcctcctgcctccacttctggagtgccagtatctgtatcacaggggtgtaccaccaccacctgtcttgaaaattgccatgaatgacatagttcacatagccatgggtggccaaggacactcctgggtactcttactgcatcttcccttgaaggactttgctaaaatcctgtggagaaataagaaaaatccaatacggnacaaactgnatttatatgtgtctgtgntgtcaatgagggggtctgtnacctcctnttccaanngtggggtgctgtctgacctctttnttntncaagcccacgccaccgcccga

SEQ ID NO: 3653 - DNA, 260 bp, Homo sapiens
ctaggtgagcagtggactcccattgagcctaaacccaaggagcggccacaggttggaggcaccatcaagcaaccacctaccaaccccccaccccggccacccgcagaggtccgaaagaagccgagtgagggtgaagaggaggcagcctcagctggaggaccccaggttaacccaatgccagtgacagatgaggtcgtgtgaccttcagtggctgtctacagctcctgcttgagtttctgtggagttgtcccccccccccc

SEQ ID NO: 3654 - DNA, 593 bp, Homo sapiens
  misc_feature (1)...(593): n = A,T,C or G
caccacagaacggagatcgatcatcntcaaanattnccntgagtgaccctgcctnnnagctatgtcgataactggctaggnatcttnataactngttcagatntgaatgtgctggccccannctcagaatggaggtcnganactctggatgagancgtctccacgtgttgaaggaagggcanntngctcaagattcntccaanacnacctgatcanggccntcnagaactnaaagccctgggctctggattcngcatcntccctgtgggagcactacctcanccantctgttccgcnnagctcaatatggatcanctnttgtgctgcagcnggncgacaaaaacggtnngtgaccgtcagtganatcccaccagtcttaatgggagaccgaacgacncggcnanttctggaacacctgctngatggaatgancggcctgcgttggatctgctgctccnagggangcccccctactngctgccntctcttttactcagaactctaccccaaggagatntttcctnaagnagccanagaaancttcccntgaatnantttgcangggtnaaaccaccaggcgcaacaatcctgtt

SEQ ID NO: 3655 - DNA, 395 bp, Homo sapiens
  misc_feature (1)...(395): n = A,T,C or G
ctccgatgagacgccnngttgtacctacgctctctngacttgggttgatctgactgctgtcttgggtatcacggntgaagacatgnctgtgtcntgncgtantaatggactcgnccgtctggacaactatcagaaaactccaagcccacacatctgaacctactggcantancctgaangatacngcacctgggagccgttgaaaaggttggattgtctganaacctggatctgtttggctgtgaagtcctaaccggantgattaccganaactgtcttcngctcctgcccactntccatctggatggctataacgagaagacaggaaccnctganccattggagtnatatgtaaagaaccccgacccaaatggacagtggatggttggactcga

SEQ ID NO: 3656 - DNA, 421 bp, Homo sapiens
  misc_feature (1)...(421): n = A,T,C or G
ggtttgccagaatcaaaaatgtgtagcagacactttcttgggctatgattgcaacctggaaaaatgcaaccaccatggtgtatgtaataacaagaagaactgccactgtgaccccacatacttacctccagattgtaaaagaatgaaagattcatatcctggcgggagcattgatagtggcaacaaggaaagggctgaacccatccctgtacggccctacattgcaagtgcttaccgctccaagtctccacggtggccatttttcttgatcatccctttctacgttgtgatccttgtcctgattgggatgctggtaaaagtctattcccaaaggatgaaatggagaatggatgactttttaagccaaaaaccattttnaaagtgaangtgaatccaaagactantctggacagattccaca

SEQ ID NO: 3657 - DNA, 234 bp, Homo sapiens
  misc_feature (1)...(234): n = A,T,C or G
agacacaaccccttccccgggatccagntncactccngtatctctnataatccgtnngctatcanaaaccgagatgaactgnntgaannacaggacttccatagttcgttcatntactcgacccagagtnccttntccaggttattgtntaccaatttgcgacgttccatctcntgctgnttctgntcaccaatgaagtcatgccgctgcaggtatcagctctaaaaaaaaaaa

SEQ ID NO: 3658 - DNA, 332 bp, Homo sapiens
  misc_feature (1)...(332): n = A,T,C or G
cctagccagactggcttagaccatccgccactgagttggagccacctgctgtgctgattctcatncatctcctttgatatgccactacctgcctgaggcttaaccggctctncaagatcttccggagttagctgcgaactgtgatcctactaaactgagagttcctactaannggctgatctgacancttnaaaggaactttgngtgacggggaatgggcctcccctcttctttatagagcangttngctgacattanagttgaacctgagcaggaaaaacccaacaaantggaacaataaattcctcttgcttttgcattgattcccaaaa

SEQ ID NO: 3659 - DNA, 498 bp, Homo sapiens
  misc_feature (1)...(498): n = A,T,C or G
actgaggatatgacattacaactgccgctgccagcaccacagagtaagcagtccagatagccgccacccgagggtcgcggagcgctgcctccacttgcctgatgctggcagtggaacccaccatggatggggacttccctccacatgagctcccaccccctggaggtggcatccagctacagaaccgactcctgcactgtccttggtggggcagtttctcaccgtctttgtaccccaccttctccagtgaaaaccaacagttcgtgggttccaccccattccttggtggccagtcttgccctgaaaccagctaccccaccacaagccaccgtccccagcttnttntccaagaacaagcgacttttctnaacttctggnaaaggggaagccantgctggggcacgtnaaacccgangctggagccgcaatggtgaactgaacaaatagggaaaagctgaacacaacacccatcaacactgnatgggtgggagcaaactt

SEQ ID NO: 3660 - DNA, 377 bp, Homo sapiens
  misc_feature (1)...(377): n = A,T,C or G
tgtttttctcggacagaccgattactcagacacaaacggatgtgccaaggatgccagtccaagacttctgaagggcagttttctctataggcacaaggggccctaggtggtgggagtgctgaggagaggctntggaanagcatanccctgtgttctgacggtncnaccancactccctctgaacctgtcccccttcctagaggaccagccccaggttagcanaagagcgtctgaggacatcggntncaaagccccaactctgtaaccagtctgaggctatgaggtatnccagggacacctgcagcattcttgggcaagggagctggtncttgaanctcagctgagatgaggtggngacttnaaggtgcaatgaccaa

SEQ ID NO: 3661 - DNA, 216 bp, Homo sapiens
  misc_feature (1)...(216): n = A,T,C or G
atcgaaggattccttcagtnacattcgactagatgaatgccagggacccccacttcagtgttgcctgaccacctcaccccctattccagccttgttgcactccggaaacttgagtcccctgntgtcctggttcctccaactctgggaactttgctcnccactccttaactnagngactttgaacctnaataaatcctggnccccacttttaaaaaa

SEQ ID NO: 3662 - DNA, 359 bp, Homo sapiens
  misc_feature (1)...(359): n = A,T,C or G
ggaggtcactgacaatgtcatccacancatctctgatgctgttacccatgcggccaacgcctgggatgactgtngacagctngcctgtctaccagcatggntggcccttcctgacggtnantcatgagngtgnnnngtggccgngtatattgactggtgcagttctcagagctgccgcatntgaagctatcctgcagttatggatgcgacgagccagtttacttgacaatgtgtcctcatttacattcttctgtaaagaaaataagttcataggctatgtgtgtgtgtgtgtgtgtacacatatatatgtntatcattggtaaaagaaaaccnatgcctgaatctacactgtaaatctg

SEQ ID NO: 3663 - DNA, 401 bp, Homo sapiens
  misc_feature (1)...(401): n = A,T,C or G
ccacaggctcggccaggccagcatggtggaccacctgcttccagtggacgagaccttctcgtcaccgaaatgctcagtgggttacctaggggacaggctggccagccggcagccataccacatgttgccctcgcccatctcggaggatgacagcgatgtctccagcccctgctcttgtgccagccctgactcgcaagccttctgttcctgctacagtgcgggtccaggccctgaggcccagggcagcatcttggatttcctcctgtcccgggccacactgggcagtggtggtggcagtggaggtattggagatagcagtggccctgtgacctggggatcatggaggagagccttttgtgccttntaaagggaggaacattcntgnttccctgaatttcttg

SEQ ID NO: 3664 - DNA, 402 bp, Homo sapiens
actgaggtaactggggccctcatcttgttgtcatgaggagttgtaacatactcaagtgggaactcgagttgaaacgctggtgtcctggcctcaaaactctttcttatgttggcagccacagagaactcaaagcaaagagacaggagtggaccgagcccaataacttccacatctgcatcacgtcctataagcagttcttcaggggctacactgccttctcaagggtgcactggaaatgccttgttgttgacgaaatgcagagggtgaagggcatgactgagcggcactgggaagccatcttcaagctgcagaggtctgactgtacccaagtgttctgtcttcaaatctccagctgttcttacctaaagattcattaaagaaatttaaatcattgcatacata

SEQ ID NO: 3665 - DNA, 240 bp, Homo sapiens
  misc_feature (1)...(240): n = A,T,C or G
gaacctgggcttacagttcctcctacatgaccgagatctgatcagccaacccgcgcattgctttttgtgcctngcactgcagtncaggggncntttttattntccnanacttatnactcanatgntacccttttntgatgttcttttcggtnaaggaggccatgttttttggcaagggnaccncnangnagcactcgtactnattnancctgaagaaacacagtttatataaccgtagtg

SEQ ID NO: 3666 - DNA, 335 bp, Homo sapiens
  misc_feature (1)...(335): n = A,T,C or G
gaggttcctgatgtgagagggtagcccccgatcatggnaggtgcttcagtgcgatggctgtgacttccgagccccatcttacgaagatctcaaggcacacatccaggatgtccacacggcgttcttacagccaactgatgttgccgaggacaatgatgacgagccactatctgggtccatgaatgctagtaatcagacagaggtggagttctcttctataaaggatgagtttgtgattgcagaggatttaccaggtcaaagtgcaactgcattggggagcggaggttactatggccacagtccaggatattacggtcagcatattacccctaatc

SEQ ID NO: 3667 - DNA, 266 bp, Homo sapiens
ggagaaataaaaacagaaagatctccagaaagaagccatggtaagattcaaggtttcacagtccaagctaatgcctgtggacacttgaccaagtgatctgagaaaattggatttctggcaaaacaagtgtacctagactcaggcaagggtggagaacagagggcgactagattaaatggaaagaatgcccaggcatcccattgcctccctttgacgttccagaacttcatcaagacagtgatgagctacatgtacacctggaggag

SEQ ID NO: 3668 - DNA, 238 bp, Homo sapiens
  misc_feature (1)...(238): n = A,T,C or G
tgactatttccacgctgctnntttctccnaaggggcgtttantaacctgcctctnaagagtgccttcccccatggntccttntctaaagtcccctgcccggnncccccaggggctctgccaaactgtnttgcccccattgtnctaanaaggacgctactgttggccggtttntgatagaacattatgtngtcnnaggcaacnttggggggncccccccanaggactttttattaaaaa

SEQ ID NO: 3669 - DNA, 281 bp, Homo sapiens
  misc_feature (1)...(281): n = A,T,C or G
tataagtttggggtgaacttcagggaccagncctnacacaccganggatgctccctccccccagtcttggaggcaatctgcacagagccagtctgcacaccagagaccagaggccgcaggtcaagctcccggntgtntaanagggaggtctccagccttctgaattacacgcaggacatgacaggagatggaaacagaaatgatgaagtanatgatgggaatggcttctgatattttaatgccaaagctcacccgtgagaccaaggacaccaggacgcgct

SEQ ID NO: 3670 - DNA, 164 bp, Homo sapiens
  misc_feature (1)...(164): n = A,T,C or G
ccctgctggatggatccaacntggtctttanncttntggnacccntncttgtcaaacaggatctgtggtatagctcggnccncatnattttaataccctntactacatcacagtnangaaatcaagncgctacgaatcncaccttcgttaacctcctagcgtca

SEQ ID NO: 3671 - DNA, 220 bp, Homo sapiens
  misc_feature (1)...(220): n = A,T,C or G
ccctcccccacctgaacctgcttactcacgggtgnagcttgccgctcaatcagttctgccacagcccactgctggagcttgccgctttgctgttnngaagccatcacgtgttcacctgcaaccttactcctagattatttggcgggaatcggcccctcccccttccttcataacggagtgctggaatagtaaaaattgaaccttgagcagaaaaaaaaaa

SEQ ID NO: 3672 - DNA, 125 bp, Homo sapiens
  misc_feature (1)...(125): n = A,T,C or G
tcagaagcggaccacgattcgntnttcttttgtancagcttctgaagacaaaaagcagcttaaaatctaactaaggaataaaaacactgcttactaaataaactacttgtctctaaaaaaaaaaa

SEQ ID NO: 3673 - DNA, 243 bp, Homo sapiens
agatgaaagcacagtggttctattctgctcttgaacagttcaggaagagccatctgcaatactgacatcatcagtcacctattcacccagctgaccgagagaccaacccttgaagaatttataaaaaagacaaccgagcaataacaaagactaataagctaaatcaggctggagagatttcagactgtgaaaagcagatggttaaattagatctgttgggtcttgttactaaataaaaaaata

SEQ ID NO: 3674 - DNA, 436 bp, Homo sapiens
  misc_feature (1)...(436): n = A,T,C or G
gatatggctctgaagcccatgaacggaagganaaangggatcaacgccttgtgaagaancccctatagtcagaaaactgnccatctgcananntgagcganaacangcagcccctggangtgggcagnccagggcaggatgcacanccntnttgngatgaanggactangaagggccctttgnanccctccaaacaggtgtgctccccanaaggggggccgctcccagccagcccntgntnccngaacttncctatcnngcccnnccttcaggnccntgncgtccagtccagccagccccaggggcccctcccagccccagggcagccctgccagccccagcgggccgccccgggtcagcgtgcttggccccatcgatcacttctaggcttgagacagccctgccagccccggcgcccacttctgggccctggtca

SEQ ID NO: 3675 - DNA, 199 bp, Homo sapiens
gactgagatcctctgattccaggtaccatacaaagatgtttacaagaaatgcagaggtaaaacagctgctccgaaagccaaccttttgtgtccttaacggcagagtgtcagttaaatcgccccagcgcccggaagcttttattcatgtttacactgctgtgagtagttataaataaataaaccaataaataaatgctgg

SEQ ID NO: 3676 - DNA, 105 bp, Homo sapiens
gactgatggagcgcagaagagcccgaaggaagaagtggaattgcagatgtctagtcaaccaagcacggctcctgcaaaggctaaagcaacggggaaaaaaaaaaa

SEQ ID NO: 3677 - DNA, 111 bp, Homo sapiens
  misc_feature (1)...(111): n = A,T,C or G
caggctgggccacagccaactgcnctacttgagcatgggtggctccagatntnctccttcaaactggantnagctggncctcanaaaaacttntcccccataaccagcttc

SEQ ID NO: 3678 - DNA, 289 bp, Homo sapiens
  misc_feature (1)...(289): n = A,T,C or G
aaagctaagtctcatcctcatcaaagaagagncnccttacttcanacagagacngcttcaanagcccncngatgatctaacacagagaacactcggccagcgttgttgaacccnncngatgcaacancccctgccctgagaactcnnnncngaggngagggtgngangnatgngggagncagtgagcctggatgttggctgtgaacattttcccactgactgatcttccaaaagttctgagttcaaatcccaccanccacatgnnnatctnacaccctcttctggtgtg

SEQ ID NO: 3679 - DNA, 257 bp, Homo sapiens
  misc_feature (1)...(257): n = A,T,C or G
atgacccacagcagatcagtactganggaagctcanggtcgattctatctnatggggaaggaaaatngncataattgctccctggacatcagagatgcacagaaaatcgacacagggacgtacttcttcagattggatgggtctgtgaaatacagttttcagaagtcaatgctatctgagctngtgatagctntgactgagggccctaacatccaagncacatntaccctggggtntggcaattctaccaaactgct

1. A transgenic mouse whose genome comprises a disruption of a gene and wherein said disruption results in a phenotype that differs form the phenotype of a wild-type mouse, said gene selected from the group consisting of:
a. a gene comprising SEQ ID NO:9, wherein the disruption of the gene comprising SEQ ID NO:9 results in decreased depressive-like response in (−/−) mice;
b. a gene comprising SEQ ID NO:10, wherein the disruption of the gene comprising SEQ ID NO:10 results increased artery-to-vein ratios in (−/−) mice;
c. a gene comprising SEQ ID NO:11, wherein the disruption of the gene comprising SEQ ID NO:11 results in infertile female (−/−) mice exhibiting ovarian hypoplasia;
d. a gene comprising SEQ ID NO:12, wherein the disruption of the gene comprising SEQ ID NO:12 results in an increased percentage of natural killer cells in (−/−) mice;
e. a gene comprising SEQ ID NO:14, wherein the disruption of the gene comprising SEQ ID NO:14 results in a decreased percentage of CD8 cells and an increased percentage of B cells in the peripheral blood of (−/−) mice;
f. a gene comprising SEQ ID NO:15, wherein the disruption of the gene comprising SEQ ID NO:15 results in compensated hemolytic anemia in (−/−) mice;
g. a gene comprising SEQ ID NO:16, wherein the disruption of the gene comprising SEQ ID NO:16 results in decreased bone mineral content and density in (−/−) mice;
h. a gene comprising SEQ ID NO:17, wherein the disruption of the gene comprising SEQ ID NO:17 results in decreased red blood cell count in (−/−) mice;
i. a gene comprising SEQ ID NO:18, wherein the disruption of the gene comprising SEQ ID NO:18 results in an increased percentage of NK cells in (−/−) mice;
j. a gene comprising SEQ ID NO:19, wherein the disruption of the gene comprising SEQ ID NO:19 results in increased serum IgG1 and IgG2a responses to ovalbumin challenge in (−/−) mice;
k. a gene comprising SEQ ID NO:20, wherein the disruption of the gene comprising SEQ ID NO:20 results in enhanced learning/memory in male (−/−) mice;
l. a gene comprising SEQ ID NO:21, wherein the disruption of the gene comprising SEQ ID NO:21 results in small male (−/−) mice, exhibiting a decreased fasting serum glucose level;
m. a gene comprising SEQ ID NO:22, wherein the disruption of the gene comprising SEQ ID NO:22 results in impaired sensorimotor gating/attention in (−/−) mice;
n. a gene comprising SEQ ID NO:23, wherein the disruption of the gene comprising SEQ ID NO:23 results in immunological abnormalities in (−/−) mice;
o. a gene comprising SEQ ID NO:24, wherein the disruption of the gene comprising SEQ ID NO:24 results in decreased pain response in (−/−) mice; and
p. a gene comprising SEQ ID NO:25, wherein the disruption of the gene comprising SEQ ID NO:25 results in increased serum glucose levels in (+/−) and (−/−) animals.

2. A mouse, said mouse being off-spring of a mouse according to claim 1.

3. An isolated cell, said cell being derived from a mouse according to claim 1.

4. The cell according to claim 3, said cell being selected from the group consisting of a stem cell, an embryonic stem cell, a hematopoietic stem cell, a progenitor cell, a fibroblast, a nerve cell, a muscle cell, an epithelial cell, and a teratocarcinoma cell.

5. An isolated antibody, said antibody being prepared by introducing an antigen into a mouse according to claim 1.

6. An isolated antibody, said antibody being derived from an antibody according to claim 5 and said antibody being selected from the group consisting of a polyclonal antibody, a monoclonal antibody, a multispecific antibody, a human antibody, a humanized antibody, a chimeric antibody, a single chain antibody, a Fab fragment, a F(ab′) fragment, a fragment produced by a Fab expression library, an anti-idiotypic (anti-Id) antibody, and an epitope-binding fragments of an antibody.
